United States Patent Application Publication US 2007/0054278 A1 - sequence listing, part 34

SEQ ID NO: 94247 - DNA, 469279 bp, Homo sapiens
  misc_feature (1)...(469279): n = A,T,C or G
taaaaaaaaaaatcacatgaagagatgctgtgggagcaccatgcatgagagggggctggactgggtaatctaaagacctcttccctccttgcaatataatagttctatttttagttaaatctagcttagacactgcctgttgaaatcaattcctatcaatagaacctaaaatatttttctccatactaattcagcaagctcccactgtagcttcatattttttatggccatgatataagtctgacaatcttcaactctaggttgaacacgggaacagtttaacacagacacagttctatgttagctaatggctgagaagggcagtttagggagcgagaggcttctctgatgagataacatgagaagtaagacctgaatgataagaagaattggagcacataagacacaatttatgtccccagaatggctggcttccatctattctctcacacctttgtgtctttgcttgctcagtggccagcccaagccaccattgccattgccagtgcctcatatcccaactgtgccagtgacctcagcctctcccagtgactggattccactgagattgcattagaaggagactcacaagtttggtgctcaggtgcaatcagtctgtatcctcagaggttcctccaatcactgggggatctgggttccctagcagttgccataaagagccagtaacagaacctggaggtgagggtgaattaattagttctctaagggacaaacttcaaccagtttcaacaggagacaagaagacattggcagagaatctccactctctcctgtggacagaatgtttctggatataatgatgtaggtcctgtctggaagaagtgctggtgaccaagaaagcaggtatgttgttttgtgatgctgtagtcattcataactcgccaccttgaatttactttcccctccttttcagccttgattctctttttccttcattcttgagtcctggaattacaacttcacataaagtcttggcttgtaagttttgcctcaggatctgttttctagaaaactcagacaaaaacaaacacaatacaaaaatatgaaccatagttcaggaattgtgctcaggttcatggaggtgctcaggtttctgccgtatattcacaggggcaccgcaggatatattaaaattttgaaagaaactcagagatacttgacatttgttagacaccatgcatactactgactcaatgtagttgatagtttcaacactagattacactacattctttcagtgacatcattatgtttgcaaagctgggttttggtggttgcaatttcatgtggtattaaggagcaataccacatgaaaattagtgtggaacaggaaatgaaggtggtggtgtctaatatgatcctaagatttgagaggttgtgtcatgcccattactatcccattggtaagtgattgtggctgcttacaaatgaagtacaaacattttttctttcaatttatgtttttttcaaatagctactaatgttgtcaagaagtaaatgtttattgaattgttagcatctgaatacttaataaacataagtgttaggttcatcttcataaatctcagcctagaagtgccaggaaaaataattactgagacattcagtaaagggtggtgtgaactgagaaagtctgggaacctctgaggtagagctttacgggcaggcaggaataagctcagcatgtgatgtggtttggctctgtgtccccacccaaatctcatctcgaactggaatccccatatgtcgagggagggacctggtgggaggtgattggatcatggaggtggttccccatgctgttttcaagatagtgagtgagttctcacgagatctgatggttttatgaggggctcttcccccttcactctctgctctgcctctcctacggccatgtgaagaaggtcttttctttcccttcatcttctgccatgattgtaaatttcctaagggttccccagccatgcagaactgtgagtcagttaagcctctttcctttgtaaattacccagtctcggggagttctttatagcagtgtgaaaatggactaatacagcatgtatgagaaatgggatgttaggagagctgagtcagaaggtgagggactgcagggatggaggaggcacaggagagaccaagtggggccttgtaggctttgacaagagagctcagttatcatttctgtacaacatgatacatcctggaaacttaatcctggaaacttctttttctttttttcctcagtgacaacattttcaaaagctctattatcttttcctggttttatacataactgaggtctccaatgtgtgcatatgcatgtttaaatgtgtcactttttaaaaaaacattctgtgttatttctggaaaattcctgaaattcctgaaaactacatacatttaaaaatgttaaatataatgttctcattattatctggtcttgcagtcttatctagacttaaattttttttcttctttctttcaaacttcacattgaagcccttttatcaagctcggcatttaggagactcaaggttggtatttaagactaggatgacacctgttttagattgaacagtaattaataatagaaaggtgagttaggaagctcaccaaatggggcatggctttgggcccagtcatggaaatattgtccatctgaggtctgagattatacttccaggtccagacactggatgtttcaatatacccagagatgctcattttcttggttatgtacttatgttactcaaaatcacatgcaatgcagtttcaaagcagaatgtcaatttatttttgtgattagaatgcttttgacccattttcaaggattccactttttagtgtcaaggaaactaagaagcaggatgaataattacaaggttacttggtgatcgttgaaaaatagaaaggaaaataaattgtctaagagaatgactaatattttaagtaacttctcaggagatcrccccacaacagaattcatttgtcttttgctggaattatttgtgcttcccaaatgtcgctctgtcttaagttagagttaatgttcaatgactgtttttttaaaaacccaatattcctctgattagcaacccattaatacactatttaaacatataaatacacacttgagaggtccagctggcttttctgataggctgggagacattctgttggcatgtacttattgaatcaggcaaaacctcaagactctagctagagccattcaactccgcttcactgtgaccattttcttatgtatccttccagaaatattatatctctatagatcttcttttctccataaatgatagcatactactaaatactctgagcattgtttttctttttttgttaacattatatatttgagattgttttatattaatgaatgttaacttgccttatgtatcttgacagttccagagaattccattgtttggatgaataacaatttaggttgttttcaatcttaaatccttgtgtatacctacaagtatatcagaggacgaatttttagaagtgaaattgcttagttaattaggtcatgcatttcaaacatggatagatattgtaaaatttaccatcagagagattttactagttaaagtatatcaaaaatttgaggaagcatttgttttcataccccctcatcaataccatctattatcaaactgtttgttctgaaaaatgacgtctttcattatgttcacaacgatgtatatttcttttctcagtcaataaacacttcatgatggtctatgatatacacacttatgcaattatgttacctgtttattattactgaagatatagtgataaacaacatatagcgtttatatacatgtgggataaatagacacatgacagttgcagtggtccaagtttagtacaatggtgcaatgggagctatgggaggtacgtccatcacagtctagaaagggatcatcaacggaggcttctagtggggagaaacatggggagagacatgtaaactaaaatccgatggaggtgtagagtagttggcttggcaaatcttaggaaaaggagaagcaaagaagaggagacagcagactcacacgtgcaaaaatgggaatggagagagcagagagcgtgtggggtttgcacaaagaacagttcagaacctcactgtcatgacagtatgaagggaaagcgggcagtactccaccacccaccaatgtagccctcaaaatcagctgagttgtttgaactttaccctaacggcaatatgacataatcaaaagatttttaagtggaggcgtgaaaaatcagaagtattttggggctcacacttgagattggattggggaagatacggctaaaagtaagtgggagtaatgagggggctgtcccastaattgggttcagatgacatttgcttgattttagggatgtacgagatattcgtggatcttgtgttgaagcacctaatacacgatgtcccttctgaagacgggtgcattaaactggggtgaagcacaaaggccactgagcagcctggcttgactcctggctttgccagtttgcatttgcacgtgtccaagcccttgagaggtgctgtgaaaacatagaggtggatgagggaagtgcttatacagcacataccgtataaaaagagggcttcatacttgctagttgttttaatttttattattacttttcctcgctgcacatggaaatgtctttacctttgtcttattataaggtacatacgaggagagttacagaacatgggtgttagaagagatttgacatatctgttcattttcctaattttagtgatgagaaaataaagggaaagaaagcaatttagatttttgccagtattacaattctttgttcacgggcacaccacgccagcctgaaactgttcattggtctggttctcttaccacctcgtatatgtaggtttatagtttggttacgaacaccaccttgtcttaaccatagatagttcctgtgtttgccgacagcagcgatttcttgtgtggaaacccctaatttgggaaacaatctgttttaaacactttgtagcacatcactcaaaccgcacagttttcgataatcttagaaacaaaaactggggttgaggcggacagttaaattctgcagacaccacaagcttggattcgtttcagcagtcggtcctaagtggtttgaagccccttccgggatgcctcttcttatacgaacaacgcagcggcgccaggcgccagggtcctcacttctgcctcctggatttcctccgcctttctgcttcaccgagggccctgtgatccgattccatcgaattarccgctgtttaccgagggtctgctgcgcctaaggaaggcaccgggcgacgagcaaggcggggacgcagtttggggacgcaggggtccgggccccagtccagagacaggaggtcggcgcttcgacttggcacccgccgacgaattcactccaaggttcccactggcggagctcctgctacctcccccctcccctaaatgcagctcccgctaccttcccgcgcccaggggctgctgcctgagcccagctctgctcactggagggcggcggtggagagggtgctggcccagcgtcggcagctgggctcaggaccaaggtgggcgcccgccggtcctggtccccccagcctcacggtgcaggacccagggcgcggccactcgagttccccggacgctctccttcctgatgctcgctgtccctgccctggcgtccccagcccggggtcgcagcctgtcctcctctctctccccctccgccgcagcccgtcgcctccgggcagagttcatgttcagcttgggctttcgctcgggatttaggaagaggccggcggggctggagggtgcgggccggcgcgggagggcgcgggaggcggggagcggcggcctctgattggccggggcgggggagtgagcggagtttcccacaatgccccggtgcggtgcagccgcggatggatgctgcgggaaggggctgccatttgctgcccctgccagcggcgcgcggacctgcccgcgctcctgcagccgccgccgccgccgccgccagcccgcccggcccctgcagcggcgccgcctgcgctccctccgcggccgccggagcgggcgccatgaaccccagctcctcggcgggagaggagaaaggggcgacgggcggcagcagcagcagcggaagcggcgccgggagctgctgcctgggcgccgagggcggcgcggacccgcggggcgcagggtcagccgcggcggcgggggccgctgccctggacgagcccgcggccgccggccagaaggagaaggacgaagcgctggaggagaagctgaggaacttaactttccggaagcaggtctcgtacaggtaggtgcggggagccggcagccgagacaggtgcgccgcggcgggagacccactcttctcccagcaaggggcgcttccgcggagttgggcacctctctgtttccacgcctctccttccccctttccccctctcctcccggggatgtctgtcttctccccatcctatcattccaggctggagggcagcaacgcctgctttcccctgtggcaggagagaagcactgggtccctaaggtcagagcaacagaaattttgtctgtgtgtgtgtgtgtgtgtgtgtgtgtgtgtgtgtgtgtgtgagagagagagagagagagagagagagaaagagagagagagaaagggttgcagactcagtgatgcttagttttcttaagagaagtcgtcaaagttgcccctaagcaggtgtcatcttcaaccacccttcccccaccttccagatttcgctggatgaacctttggcactaacttgacagctgagatcactccgacaggcagaaaagaatagcactacactgaagagaaatccttatggaagttggacctgcctcgaaatcccccatgaaggaagagtgggtttatgtctgtagatgcgccactggttatgggggctccatgcctgcrtgctccttgcctctctcctggctggaggagggtgtggggagcccgctggcaagctaggggtgaaggtgagagtggggaccatatttgcacctaaggatgagtgtatgtgtaagacaaggacagtgtgggatcaatggcctttaaattaggataaaagataaccccacattgtattagaatccaacaacgaggaattaggatttattaaggtctctctcacccctcccttccgcaggcaagaataaagacattgacaggtttggagagttgttgacactaaccctactgcttatcgatgttaaaggtcgaggtgatatgcaagcataggtttacaaagatgtacacttgctggagctcagagggtttctggaaaaggggtcagtgaaaacattcttgtaaccctactctttctgagttagtgttcccttcccaaaaaccatataaagtattaagcctgtcacaccatgtgctgttatgtaagcaaacgcagatgacagaggtgtgtgggtttgggagggtgtgttttatttatgggggcaggtgtgtgaataattgggatccccatagacatcgcctggcctggaggccacagtcactagggcatgtgctctgtgtctaagtgttgacttctgatgactcctaaaacgccttcctggtgaggttgttgcttctgcgttcctcccatgcattttgttcgctgtgcgctgagggagttccccacctgagttgttctcttagttactcacacagatcaggtccaaatggatctttctttttatactttggtttctaaaaatagacagatggtggggagggggtagctctagggaggtatgctaggacactggcagttctacttcctagttatgatggcccgtctggcccctgggggaacagggactacattcagcctaatttaggagctgtgagttggaagggggtggtgattacatgaagcacagtgtaggctgctcctggcttattggtattcatcagagtcctcactgggtaggaagacaaagccagagtttgcaagggaaatcatttcagcttgcctcttgtcaggggtcattctctgagcctccttttttaaaatgtatgttgtgtggggttttggctttctgagttgcatgctcacacatgcacgtgtaagtgtgtacacacacaagcatagacatggacacagacgcagcatgtttctatagaagaataataacattgcgtctgctttacaatccttacatagaggtggattctacttcgtgaacatcatttccttttaaataaagctttacagtctccaattcctgcatcagtgtcacctcaggtgtctggttaaaagtgctcaccaccctagacttgcagaatcaaactgtctgtgggtgagaatttttaacacgctcctcaggcgatgtttatgcagactaatatatggggattgccaccctattttgcccccaagactaaacaattgatctttgaactcataaaccctccccatccaaaccaggccagtcagtctcaaagtcagaggaaagatggtgaaaaggaggtgcttccatctggagcatgtttgtgcctgggtaacaggaaattgtctccattttgatcactgttacttatttgttttggagtaatggtgaatggcctgcccactcgtcatggcggccattggtgctggactcctgcagcagggctggctgttttactgtgggatggatgaagggtgtgtaaaaaaagagcaggtttgtcaggagctgagggtcggctccttggtggggaccacaccacctcccttctgggggcacctgaggacagtgtctggtgggagcttatggagaggaggcaggaagacctcacagaatggagtctgagtgaaaggactgagttagggtatggagcatggctgcttgcgtgagggggatcatttgaggtggaggagtggagatttgcaggtaggcaaaaaatatcttttgaagaacatgtgtatttttggaatgaaacttgacaggcaaaaagaagggggctttgggagagagggtgtgtgtgtgtgtgtgtgtgtgtgtgtgtgtgtgtgtaggggggtctcatctgctccttctgttgctaaggaacatataagctagggtttaaaaataaatgaggagtgggtgggcatatgcagtgactcctgtctttttaggaaccagagccctttacaaaaagcctttaaataaccatttctggaggcagattattcattttgcttgacttttactttgttaagtaaaataaactgctttctgtactcctagatttcccctcattatctattctgtgttggctttttttgagaaccatttttcccatgagaattttttcctttatttcagaatctgcacccctagagcaaatagtctctgtcgactgtaaagctgaaggtttgaaaaggcagtgcgagtgagctggtacttttcttttaaaattactacttcgtttttctttgcaaattatggtgctgcaacagatacatatgtgtaaatgactatatactgtgtaggaactgtttttttttttaaactgctgtaagaattcccatataagtcagtacaataaaaaaaaaaagacttcagaaacacataagggaggggaaggagaaggtagctgatgtttattgtcttctatgcaacaggcactgggctaagccttattgtatattctgtcttaattaatctttgtgacagtcctgtgatgtgactatgactatttccattttattgaaaatgaacttgaggcatagagcttgggcaggaggcagaatttaaaacacagatgactccaaaggactgtctctttagaccgcatcacgctgcttccctaaacatttattttaggcttgagctctctgtccatgtgtgcatatgtgtatgcatgcgtgtgtgcagtgtgagttatcttccccctcatctgtaatacacggcaggtcattacatattattattattatatattattgcatacctttttttggcttgtggccctttgtctatataattttagggaactcttctactatctcagaaatataaatgaatataaattcatgattgcaaatatatcagttttgcttctgagaacaaaaccacctacatgcacctgctatgaagatatcctcgttagaggtttatatgccttaaaaaaaaatttacacagggttgtgtaggcgaacctaggtccaatgaagagctggcccatcggtacctctttgggcagcacagaatgagtgatgaagtacaattttgcttgtcagtatgtctgggcagaccattacttatgagatgttgatgcctatgatttagtttctctgctcataaaccatgctggtaatactaaacctttcttaaaggaagtttttggtatgagatagaaataggagcaaggagtattaaacgctttagtttgggcaaccatgtaaaaaatgatctgttattctttataggttgatgattagaatgtagtttttttgcgtgtgttttgtcccacaaagtaaggttgtgttattacaagaaagatatttgaggagttcgaagccacgtaggataaaatggatattggtcttccttgcattgtaatcaatagtgtatgggggaacttttctcctgaatatcagtatgtatcctcttttgtaaatccattttattttgtttttatccgtgttttgcacatctgttagatttttaaagactgtaggatcagattaagatcttggttctaatttaattcctttctcagtaatgacttacatactgactgttacttcctcagttaggatacacactgggcaagatttcaattcaaccactgtccggagtacttattctgctctaagtgatcttttagaggcttgatttttacctgggagattgacactattgggtcctgtggaatctggggatagggaagttgaagagaggtctttgctggtgttcaattctgctgtggcaacaaacaacagcattgcctcatggggccaaattcaattagactagagctagctctttccaacaccgcactttctagtctgaggaaatgagggttcctagtgagagcccaggctgtctacaccctgtatgttcgtctggcctgggatctgagaacatgttccctacacaaccccaaggtatccttgaagttgagtacactgtgagaccagaagcatctggaagaactattgcctacacgttgggctgtgacatttgctttcttccatgggtatgtgttggtaacactgatcctgtggagactaattatttttcctgaggtcctgtaactagttttgggacagtagttactgcaaataaatgatggcatgtgagcttttcttacagtggataactttgaaagaaaggtcagaagtaaaatgaaatctaagccataaaactttttttcattaaaatttaatttgctcaaaatgcctataaaaatgggctgatttctaattgttggaactgattgaaacctatttcaaggcacaaaaacaatgcagataattggagaaataaaaataccaagctaagtctgtttgcccataatgcttccacaactcattgctggcttgttcaccaggaaaactcctcgattggtatgagctcaaaagcgtccacttggggtgatgggtggctggtgctcccctgttctttcaaatagctttgttgagacaagtgtcattttctggtctgggacttagactagggtttgaacttggcatctttctgctaatctcagacaagctatgtaactccttggaggcccagccaatgtgtttctaaaatgagataatagtaatacaggtttgttaggaagattaaatgagttactttatttaaaggacatggcatagtgccctacatagagttaacttgtgtacttattaccattccccaaactaagttgttagctcctttgaagacagaacttgcacctgatcatttgaatcgatgactctgattcttcttgcttggtaggtgttggataagtatttattgaataaatacatttcattggcattttaaaataaattactactgttattcattcttggttcatctcaattgtgagtttcttttctactaaagaaacctctgcctttttcttatttacactttgtccagcagcccaggactgcgttactgtttacagcttcctgtttgcgtacctgcatcagccatttaggcagctgtgaggctggagaggggtggcagaaactcttacttaaccagctatttgcagcttgtcaaagaaaaggccttaatttgccttctgagtagcactaattagctctccggttctctttctgtctgtctcatccctttccaaggggcagcattgattttctcctcagggaaatttctgttgacttttccttcagtgattaaaatgtaaaaatgcagaaaaagggctacccagcattcctggagtcctgaccattgtccagccagccggaggtcactccagccacctctgttctatattacttcactccctctttccttccagctcatctgattgactttggtgaaaaagttattttaggaagaatgcattagtccgcttagtgactctaagcttttgctttgtttttaacccacttaataaaatcttcagaaaagcaccagctactttttattcatgtaccatacagagcacttgaagaatggctcacgagtgtcctgacacccatagtgtttagggagaggagggatgagcactgcttgggttactttagagaaaattaaatcatcttgtgtgtgcatattagctgaaggagggggctgtgattgggtagaggtgggaagaaagatctttgcatatgaatgttaatgttctttccttccagccctgagttttgtgagcctttgaaataaagcaaacagcattttcttttaagggcaacagctttctaacaggggcttctgtcattcttgcatccaacctagttttgctgaaatggaaatttgcctttagatttccagactcataaataatgttctgataaaagaaccaattctggtttaagctgtaatatttatagcctggcttttgttagatgttgggaacaacattcgaaacagtaatatttaaaccacaattaaatttcatttttcttaactttcaattacttgagaggtagaggagagtactggtgaagagccctgctacctgggtccaaagcgccacctctgcctgctgtgtgcctgcaaaagttacttaacctctctgtgtcttaatttccctatctgcaaaatggtagtgatagtagtactcatcctgtagaattatttgacatttaaatgagtcacaaagtacatgctatatgtgtgtttgttaaagtggtattatctatactcaagtccagttaaggaacagatttgtctattattcttcaaaatacagaacatcatcaaatgtcagcagctggtgataaaattattcaggtaatatgaaaatgagatagacatagacttgagaaatttaactgacaggttttggcattctttaaggtatagaatatgtactttttctttcataacttattaaaacacaattcattgttactaggggatgtgaaggggagaaagctgcttcttagtgctttggaaattggagcagacagaaggcagaggtcggaggagagaggcacagtcagtgtgcggaggaatcaggtagcagcaatccaaactcccagctggtcatctgagagcaggaagccagccrtggaggggtgggtgagaggggtctcagagcttcacagtgtcaggaatggataagctgataaagaccgaggtactagaaatagaattgtcccctgtgattccaggacagaggttatttctcttctggcctgtcttgatgatgcctgctttgtacatacagacaatggccggctggcatgccctggcaatcacagaaagaagcttcgcagatgctacctgccctggattatttcagaaatggaaggtgcagccttctgggatgttccatcagttatttgaaccaggccaaacagcagaatatattttaaaagatgtagatggttattaaatatttgttggacaaataaaacggctcaggactgtgaaataaattttgaggaggtgaattcattttttttcccctaaaaaaggcaaagataagacagttggactgcttttgtgtatcatgtagtctttcaggaaatagccagaaaatagattccttgaaaggaccaaagtacattttaaaaatgtgtcattcctttgtacatgagaaagatgtcaggcttgtaaggaaaaatacatttttgcttttttaaaaaaaaaacttgaaagcaatttgttgaaagataaaaagagctttacataagcttatgtggaagcggtcggaaagggttccgtgtatcatttagagacaaacttctggaacattcctcaggctgaaaggcctcagatctcatcattgtccttatggatgtgtcagagtttgagacaatctctttcagactgaaagcattctctttaagagttttgaaggaagagcctgtaatcccagcactttgggaggctgaggcaggcagatcacaaggtcaggagatcaagaccatcctggccaacatggtaaaaccccgtctttactaaaatacaagaaaaattacctgggtgtggtggtgcacacttgtagtcccagctacttgggaggctgaggcaggggaattgcttgaacccgggaggcggaggttgcagtgagctgagatcaagccactgcactccagcctggtgacagagtgagactctgtctaaaaaaaaaaaaaaaaaaaaaaaaagtttctcccttttaaattggccccctctcaatgcaaagactaaggtgtggcatgtttcttttcctatgcaattgaagcaccgtcctcagtgtctgaagttacacaggaagctgccaagcatgggcttccctgacagcgcacaacctcggggctgcttggttttcatggctgtcttcattagcttgggctgctgtaacaaagtcccatagactgggcggcttctaaacaacagacatttctttctcatcattctggaggttggaagtctgagatcagggcaccaacatggtcaggttctggggaggaccctctttggggctgcagacagctctcttctcatggtgtcctcacagggtggaggtagtgaggctcctgggggtctctttctagaggggcactcatcccattcattagcgccccacccttgtgactgaatcacccccagtggccccaccttctagaaccatcacattgggggtgataatttcaacatgtgacttttgggaggacataaacaccagcctaccctgctttttctcacaatattccaggaagccacagacatcactcctcttgtccttcccagtggcctctgaaggccattcccagaggcagcaaaggcaatccatgcacttccaagctttttgtaagtgcagctcagagaaggaaaaagcttttcttggttcaaatactgaccgcaacgattaacttacctccctacctgtgaatattaatcattataagttactgattttgccaaatgcttacactgtgtcaagagctgctaaatattttacatttgggatttcactggaccgtcaattaagtagggactattattatttccattttacagagaaggacattgaggcttagagtttaagcagcttgcctgcaagtcacatagctgagtggcagagttaagatctgtgcccatatttgcatattgcttattacttccctattgcagcttttcttgtcctcttttcaccctttcccattaccctctctgtgtgcaaatagccatattttcacaatctagtggtttattagaccaaactctcttgaggagagagacccatgtgtttcatcttcatgggcccagccagacctcacacaagacatagagagaggccttgacaaaggttgattggctgagtggatgaacattctttttatgtctaagcataaaacttagctctgtgaataatcatgtgctactgtcagttgtagggaggccaagattgagctttccatggtgtttttttgtaaaaactatatgaattttccattgcacaagacgggggaataaatccagtttcctggggccaagaaatgattgcagggattatagactggtactgctccttttaaattctacagtacaagaccttgtgatttgttgtaatcacagtggaacttgaagggaggtgatggtaccatggattggggtccagtgaagaagctagggttaacttatgtgcactttacatgtctgaaatggcatagtcagccccatttgatttttacaaaagatattcttagaagagtctggtcttttacctttagctcgaggacctgtttgagctgcaagtctttgcaatatgagtttttccataacaacatccttcagaattcgtcagtatgttcatgagtgcagttagagacacctagaaagttccaaaggaacattttgaaaacctgagtcatwctttctcatttgaagaaaactttcagaatttcttaggaaaataaacctctacttcaaaaataaatgcccaagctatttaaagattaaaacagaagctttctatgagccagcgtggaattacttataacaaagtctaagggattttttttaaagacaaatttctggagatttcttaaactgttatactgactaaatttaggtacttaataataataaaaatgtgtgtggtgctttcacagcttaccatttataaactcctttcacataattaatctaactactcacaaaacaatcttaggcaaccccgtattgttttcatagccattgtacatttaaggaaacagtcacagtagctaagcgactttcccaaggccatgtgccataagggacattgccaggttcaggctggttttcggatctgaagtctcatactcttttcactgcaggatgctgtttcaacacatgaatctatggaaaaatagcaccatttccctctcattaattttacttacttgaattaatctcactggtttatcacaatggacaaagttggaatcactagctggtattctaaatccatattgcattgacaatgaggatgacctcattgccattgtcattgcccttcctgtacacatgaaaacatgaaactacaagtgtgatggtatatgtttaacactcctcttactggggaaaaagaaaaaaaaacaggtagagatagagtcaggctctttctttgcattagttgctaagcagcagccatttcattgtaaaggagacccagttcaagtaatggcataggtattccaagaatagtatttcatttttatagcaattgcatttcaggtctccagaaagcatatgcttctgtagctcagtgatttttaggggaagaaatagccacctcaacatatttgttgaacatatggagaaaattcagtatagctgattacctaataaccagacttccgtgagccgcacacggttcacaggggcagcaggttcaggctacccacagtttgaaggatttggaagtctccagaaaatactgctaacaaacaggtacgttttgaggctgtatttgacattcaccgataccatctcaatgaaatactctgggtaatttagaatgctaagggtattgaaatgacatggtatagaacaaaattttgttgttgcagccaaggggttggatggtgccaagatttcattgtattgagctttcgctggcagctgaaagctcttcaaaatgaagatagaaaatacggtacaagacaagcataattcatggagctcagtttatcagaaggatctgagtgcagaggaggacgtatacttaatgtcccaatgggtatgtgtgtgaaggggcgatgtcaatatacaaagctgtcaggtgctatattttttgattgcactatcactattaattttgaagatggattgatctgtgtgtggaagccttgaagcccttggccctgccttttaaggcataaaaggcatttctgccatctctgttgtaatttgccaaactattgtgaaacttatgtgtatctatacaaatgtattttcttcagagaattgcttcatggagttgttaagggagcaaactttgttgttttctaagagtgtgctgcataatactgctcctcaccattcccctcctcaagatatttgagagaaaatgcccctttccaggagcagctgggatgctgggaagcttgtctttaatttccagtaagttgcccttccatttaaggcaaaatacctcttccaggaactaaaagtcagactcagaagaagtaatacatggatgaattcacaaatggtgaatggttattcccattgtggtgctgggttcattagtatggttggttttagcatctctcgaacaattaatgcctctcatatatgtttcatcatgcacttttacaatgactcaaaacagctttagcaaaagcacttgtgttatacgaacccaatatatagatggtgaaatcaagacaagaaaggctggggaggagagatctaaaacattgacttcccggcctggcataaaacccatagaaatgcaagatcctaagtgtctctcagaaaaagcatatctgggaggtgctcaatgatataccttcaacattaatatgaggtcctacttgccaagaactgtgaagtgctttacatatgtggtttcagttaattcttatcacaactttataaggtagatgcttttactatccatagctttacagaaaaggaaactgaggcacaggataatgaagtaatatgtcagggtgtcaccaccagccaacggtggagccagggtttgaattccagaaccccctgtctagtgcacttaagcattattctgtgctatattcctatatgcatccaaaaccctgtttttccttttaggaatgacctctgtcctcttgtgtgtagccttgaggggctgtacatcaaggtgcctggctctccaccatggtaaccaatgaggcctttggaagctgttgtagggggcttcctctcaccaccctgatagcatcttggggcaagtgtatgacttgagcttggacgaccagactctcttggacttggactcaaaggattgtcaaagggattgccaatttgttcatatccactggcagtgccctggtaggacaattcctgctgctctggttcctgtctttattcaaagcataggttgtgatatggtttggctttgtgtccccacccaaatctcatcttgaattgtactctcataattcccatgtgttgtgggagggacccagtgggaggtaattgaagtatgaggatgcgtctttcccttgatgatctcatgatagtgaataagtctcatgagatctgatggttttatcagggtgagtttccctgcacaagctgtctctttgcctgctgccattcatgtaagacatgatttgttcctccttgactttgccatgattgtgaggtctccccagccatggggaactgtaagtctaataaacctcttctgtaaattgcccagtctcgggtatgtctttaccagcagcatgaaaacaggctaatacagtaaattggtaccaggagtagggtgctgctgaaaagatacctgaaaatgtggaagcgactttggaactgggtaacaggcagaggttgaaacagtttggagggctcagagaagacaggaaaatgtgggaaagtttggaacttcctagagacttgttgaatggctttgacaaaaatgctcatagtggcatgaacaataagatccaggctgaggtggagacaaggaacttgttggaaactggagcaaaggtgactcttgctatgttttagcaaagactggtggcattttgcccctgccctagagatttgtggaacttagaacttgagagagatgatttgtggtatctcataaaagaaatttgtaagcagcaaagcaatcaagaagtaacttggatgctgttaaaggcattcagttttataagggaagctgagcataaaagttcagaaaatttgcagcctgacgatgcaatggaaaagaaaatcccattattcaagctggctgcagaaatttgcataagtaatgaacagctgaatgttaatcaccaagacaatggggaaaatgtctccagggcatgtcagaggtctttatggctgtccctcctatcacaggcccagcggcctaggaggaaaaaatggtttcatgggctgagcccagggacctcttgctctgtgcagactatggacttggtgtcttgtgccccagccactccagccagagctaaaaggggccaaggtatagcttgagctattgcttcagagggttcaagccttaatccttggaaacttccacatggtgttgagcctgcaggtacatggaagtcaagcatcaaagtttgggaacctccaccttgatttcagaggatgtatgggaaatgcctggatgcccaggcagaagttcactacaggggcagggccctcatggagaacctctgctagggcagtgcagaagggaaatgtgaggttagagcccccactcagagtccctcctggggcaccacctattgaagctgtgagaagagggccactgtycttcagaccccagaatggtagttccaccgacagcttgcactgtgcacctggaaaatccacagacactcaatgccagcctgtggaagcagccaggagaggggctataccctgcgaagccacaagggtggagctgcccaagaccatgggaacccatctcttgtatcagcacgacctgaatttgagacatggagtcaaagttgatcattttaagctttaagatttgactgcccrgttgaatttcagacttgcatggggcctgttgcccctctgttttggccagtctctcccatttggaatggctgtatttacccaatgtttgtatccccattgtacctaggaagtaactagcttactttggattttacaggctcataggcagaagggacttgctttgtctcaggtgagactttggactgtggacttttgagttaatgctgaaatgagttcagactttggagggactcttgggaaggcacagttggttttgaaatgtgaggacatgagatttggcaggggccagtggtggaatgatatggtttggctctgtgtccccacccaggtctcatcttgaattgtactcccataactcccacatgttgtggaatgagcccgatgggaggtaattgaattatgggatgggtctttcttatgctgttctcataatagtaaataagtctcatgagatatgatggttttataagggggagttttccacacaagctctctctttgcgtgctaccatccatgtaagttgtgactagttcctccttgccgtctgccacgattgtgaggcctccccaaccacgtggaactgtaagtccagtaaacctgtttttcttcccagtcctgggtatgttttatcagcagcatgaaaacggactaatacagatcatcagtctttctattcattgtgaactatccaacatcttcccgataaaattcctttttgtttaagttaactaggtggtttaaaaaaagtctaactgataaaatatcattggcgaatggcccagcagcctctgcttgtgaatgtcctcagtgccagagagctcttggatacattaggggcatagttacgccgttggtcaattctaattgttagagagtttttgttataggaaaaatgaatatattatcatttagtgaatacttaatatgtgttaggaactttcttgcctcctttttgtgattttcttgtttaattctcacaacaactctgagtagttatcactattgtacagatgagaaaactgtctcacacaggggaaataatttaagtcaaagggctataattgatggagtcaattaattggattcagactcagttytaagtcacccaaagcccctatcttttcccattacattctgctgtcttcatgttgagtctgaaactgactccttaatttttttacgtacttaatattacactgtagttctggaggacattcaggataataccctttccttttctgtataacaggtcttcgaatatttgaagtcaaatatcacatgcctcttcagctcttgtttctttagactgcaccatctccactttcattctatcccttatccaaaagtggttttcaatcaacttcacttttctggctctttctaatttgacagcatactgggttatccatggctttcttcataaaaatgcagcactaaactaaaaatgtggtccaaccaaggtcaccattagcacatatggtgcctttgttcaaattagaaacaggtttcaagtctgggatgcatgaatttacaaaaattctcttgcactccagagcacagtcagctccagctaggacctctcctgtggtggggggcactgaggctgggtttctgtccccatctgctcctcctttggattctctggtgcaggatacacctacataccataggcatagctttggggacttcattagcttgctgtggctgttggttgtggatagggattagtatgggtgtggaccaattgctgtgaaactcattccaaaagttgaatatccagactgccagtttaacaaattgctgataatatttccaaagttttgcttargttgcagccatttcacttaagactggccattttagcttggctaaatgtttacttggcttgtttcctacttatttcagatgccatgcccttytagaatgttccacatccatcccttcctctgtccatccatctgtccctccttccctctctctctcatttttcctagataagaaggggcaagctctctcttaagttctatttactattatctctatttttcagacttatgcctgcatcgtcctccttttgaccctgctgctagtggagaaatgcctgtgaccaactcttccaaaaactggcttaagctatttgagaggttttggcgaactttctttcagtgagttgacacagagccaatgaagaaatccatgtggactttggctaaaactatatttggtggccaagaaaattacttatcttatccagaggacagcattttcctattttaagtacaaaggctatgccgttcaatacagtgggcactaatcctgtggacctaccaaaactaattaagtaaactaaatttgaaatccggttccttctttacactaatcacacattgagtaaataagggccttatgtagctagtagctgtcctgctggacagcacagttacagaacgttttcatcattgtggaaagttctattaaacagcacagcgttgtgggattagggtcaagatactaatttatcaaaattacagaagcctctagatagccatccttgaatgataaccttgaatgatgaagttcttgaattacgaagtctagtttcccaagttaagaagttgtactttcagggtgtaactaggaaggagagagaactgtagacaggaaatgtggggagagtcctctttggtgttccgcatcatcctkmctgtcctatgttcctctcctcaccacagtggtgactgaggataaggttaaagacagagagtttgtcttctctttcctttgcaaactgcatcttcctctgctttgccagacatattgagcattagatgtaagagaatgtgttctatagcttttgggtggcctagctgttttgccatctaaaatagttcagcttgtggtggctgcacttggaggtagaataaaggttatgggaagagcattattgcttctccagcaattaattcctaaaatttgggtaagaggatcattcaagatgaaggatatgaacttagaatgtggatgtgtagcttcaggttatgtctgtgtcacagaaattgtttcttatgctcttattcttatattattcttaacatcagttcccatcatgttaaataaatatttattgtaaattcacttgggaggcatagaagtaaatgcatggacttatacttttactgtggctcccctgattcctaggggagagaccttaggaagctgtgaaaagagcttcaaggacagagcaaaagccccaggaggatctgtgtgtgtttgtgtggattctatctggtgctttgaagtgccaatattgcacacaagggtgttctaaaaataactcaagtaatgtgcattctctgctgaagggagtgagataattcatgaggatgatgagaaatgaaaaaggaaaaggagagaagctttagaagatgagaaatgaaatacatgcatctcaatggtctctgaggctcttccacgcactgagtgctttctttcaagtcttggtattgaaagctgggaaaaagtacttaaaaaaaagcatcactgggagaacattggggttttctcacctgttttatagcatgaggaatcctctcgataaaaacttacctaagttgtaagaatagatatggaatactaatttgttatatgtgcaaaacactatttcaagcacttggtgaagaatccaaaattgaataataaatgatttttaccttaaagttgtttcaagttgcttataacttattggagaaagaaataaaaaaaatagccactatgtgccaaatactatgtgaagtgctagaaataaaagagaaataagagtctctgttatcaagaatttatggcttggtgatagagagaagcaagacattgacctgtctacaggctgataaatacaaagagagcgggcggtcagcgggcaggataggggagccctgagagagggcacttatgtctgagtggagagtggaggatctgcagcaagtgatggttaaatgtgccttgaaggaggaagagaagataaccaggtggagagaggaattaaaggacttgttcatgtcattgattgaatggagaaaacatactcagggttctaaatggcaaactagaaacagaattttagaacacagtccatttgcttctaatctctcctgaaaagctctcaaagtagatcatttgaatatttgaaggaatgaaaggctttaacaggttccactaacctagaattccacacataagtgagctttactagaagttgtatctattccgtgcttcttagacatcagcagcttgaacaaaggtaaagcagcgggcatagcatgatgcacatgattgtatctggatctgggtgataggaacacaaaagtgggagaggttagttctgtttgggagaagttttcttggagcactgactttaaagagttggtaggatttcaataggaggagatggggacacaaggagggagagtatggaaagcgttccaggcagcaggaattgcatgagaaaggatacagtggtagaaatgtatgacgtatttgtgcagcagtgtgaatggtgatgaagtagtttgggttgagcataaggatagagtggaagataaggcagggaaggttagttaaatgctcattatggaggactttgaatgccatcagaagaatttggattttatagttaatagggagccattggaggtttttgagcctataagtgatgctccatactcagctgtggggaggtccttgttctctctgaagccattgctggttaccctgcatccagagtcactgttatagctgcaagtcattcctgtgcaagtgacacctccaccctgccatgcctccagacactccagtatggacaataacttttctttctcctctagcacatgaagaaggaagggggacccctgttctgtctgcaggggccatggtggctgagaaccaggcttttctcatgccttaggaataataggaagtagggtgagtttctagtctcaagctttgggaaagattgagtaaggagaatttgagatgtccacagagtttgaacgtgaaactcatttttacataaaggaatataacggatggtgtttagatttgatgccattcattattactttagcaaaataacattgtcctaagttctatacaggtaaatacacagaaaattctggaacgtggcttgcctctgagctaggcactttccctctaaactgtttggataaactcgcctgcccccgccgcccccttccccctgccagatcacatcactggactttaaaaaacaaaaatgaagtggatagattttttcccccagattccaatacctagaaatcattgaacaaattaataggagaaatgtgtgttctgaatttattagaaaacagtagtcaagcagcttaaacattgttcactgtcagagggctgtgttactgtctaacactgttacatgaatagagattggctggaccagttaatagaaatacagataattttgcagctaagaaagatttgcctttagctgcaaaccacacactcttttcagacataatcttcagtaaatggagtgcaacattgtggaggaaagtcagtgtgaccaattctgactgctggctttcaggcctgttccagaaggattaggacgatggccggcttattctctgcattatgtacatgcattgcaatgcctgagagctggctcacgctctgcattttggagaaatcacctttcttctcatataatggaaaatagagaaacatagaaaagagagcaactttgagatcaaagtattattaacaggcaggaaaaaatagagtcttggtttaaggccacccagagtgatgaacagtcttggacccacaggcccacatgacctgcctgacttggagatgcaacctacaaactgatttcatgattaagaagttaaaaacttgatttttcaactaaatccaattgttaataatgtggagactactaagcaagttcataattctagtcaacaatactaaattcaaagatgtaaaacttcatatttttttcttgttacttaatagaggcagttttattttaaatgaaaaaaagtgtgtcccacaattttctttcttgatagccttcattcaaaaaggtttacttttcactgccctagattgacaaagacataaacaaattcagaaaacaagtctgttactgtgtcaccgtccatccatgttagaaaatactactgcctaccactgagtgtgtgtgtgtgtatgtgtgtgagtgtatgtgtatgtgtgtgtgtatgtgtgtgtgtgagtgtgtgtatgtgtgtgagtgcgtgtgaatgtgtgtgtgtgagagtgtgtgtgtgtctgtgtgttggggggtgcatgcctgtgtaaatgggcgtttttcatgtcacttgctaatcctcagataggtctcattctctgagccccaatgtcctcatctgaaaaatgaggctaatgatacctatttcccatcatggctgttggtgctgaatggaataatgtgtgcacattgtaaattttatagccctacagccatgcaagatattgctgtcaccaccaccatgcttcatcacatgtatgccgtctgccatgggataacgtgaagacattacaaacttcttagggtaatgaaatttcttaacaccagctctggagcctaggtttataaatggtacagattgttttggagacgtgcaaatgcagttatgtgagggttggccagcttttgggtttcgttgttaaatataatatttatttaaccaaagtaatatataagcaagacttaaggcatagctcatagttagaactacagagctttattgtggaagacagtgtggcaattcctcaaagaaataccatgcaatccagcaatcccattactgggcatatactcagagaaatataaatcattctattatgaagacacatgcatacatatgttcactgaagcactgttcacaatagcaaagacatggaatcaacctaaatccccataaatgatagactggataaagaacatgtggtgcatatacaccatggagtactatgcagccataaaaagggatgagatcgtgttctttgcaggcatatggatgaagctggaggccattatccttagcaaactaacacaggaacagaaaaccaaatactgcatgctctcacttataactgggagctaaatgatgaaaacacatggacatacagagggaagtaacacacactggggccttttggagggtggaggcggggaggagggagaggatcaggaaaaatagtgggcactaggcttaatacctgggtgagaaaataatctgtacaaccaaccgcttgtgtaacaaacctgcacatgcacccctgaacttaaaagtgaaaaagaatgacagggctttaaataaaacccaataattccattttcttttctttttttttttttttttttgagatggagtctcactctgtcccccaggctggagtgcagtggcacaatcttggctcactgcaatctctatttccaaggttcaagtgattctcctgcctcagcctcccgagtagttgggattacagacatgtgccaccatgcccagctaattttgtatttttagtagagacrgggtttctccatgttgctcaggctggtctcgaactcctgacctcaggttatccacccgcctcggcttcccaaagtgctgggattataggcgtgagccgctgcacctggccaatagttccattttcaaagtctctcccatactttcatttcttcagcgttgttatgatatattaactgttttttctgattctgcatttgtatttatacatcacatgctactaaccactaagtgctgtttggtaattttttttaactgtcccttctgaggtgaggatttagtagttctctttttatcccacccttatgtgtttcttcttccatccttccaatacatattacaattttatttaaatcattaataaatgcttatattatcatgactttgtaaatcttatccatagccgagtcacccagtgtgctatgaaaaccttttctttcttgtattattggtcttattttaaaacttattctcatatggacttactcatgattcttccacaaagttcttaacaagacaataaatgttttattgcatttaattgtatcaaataatgagtcagtttcatggtttttcttgtagacagcccttctggttccttccatcatcttgccctgtctgaactggtttttacatagcttccgttcttctccaatactttgacatccttctgccattttcctcaggcggatcctctgacttccagatttcctaagcgtcacacctccttttctgacttatgccttgtctgatggaacaaacaattttaagaaggagaagaacaacaccagcctcctcaatgaggttttttccccaggaactctcttcctatttttagatgaccaagttgaaaaagtttttcaggatgtgaaacatccgcaggagcttctttgcagagggtacatgggagtcagatatttagagtccttttatgtctgagaatatatatacattttaccttcacacttgactgagagcttttcaggttatggagttctagatgggaaataattttacctcagaaatgtgaaggcatatctctgttgctgctgtgcttacagagtcacagctgagaaaaattccattctaattctcaataactttacatctttttctttctttctggtttatttttaacatttttccctttatatacattgtttaggaatttcaaaactggtgtactttgtataggtacatatattcatgggttttgggacctttttagatctcttcgctctaaaaacttttaatgccaagaaattgtctggtattttttttttttgggttgggggagaatattttcctcctccccaatttaccagttgcttttttcctggaatttatattaaatagccaatgtatctactgaactattcctctgattttttttttctattaaagttctcctttaccttttattcttctttctgggagatttcctcatttgtttgccatcctttcactggatttttaaattttttgtgatcatactttttatttctatgagctctttcttgttttctgaggttcctttttgttttattttatttttgttacatagctttaatatcttcttttattcattgagggtattaataataatttttggatgttgtattcaccctacattaattctgttttcttcaaaaattttcttctcttcatgctgatagcttctctttacattggaggctgttcaaatgtctgatgatccagtaatatttaagagagaggccccaaaaggctgaatggaagctcggtgtgcatgtctgtgacttatgcttcaccgtggggtcctggtttgttttattgaaaaaaccctaaactttagcattttctgtttagttttctcagagaagaatcctccactttccttaagagttctacatctatcttttttctgaggctgaataataataataattattattattttggagacagagtcttgctctgtcccccaggctggagtgcaggggagtgatctcggctcactgcaaccttcacctcctgggttcaagtgattctcctgcctcagcctcctgagtagctgggattacaggcatgtgccaccacgcctgactaatttttgtatttttagtagagacagggtttcgccatgttggccaggctggtctcgaactcctgacstcaggtgatccaaccgcctcagcctcccaaagtgctgggattacaggtgtcagccaccgctctgtgccctgaggctgaattattattattcagtggataggctttcatttgctctctctgcttttagtagagggtctcacactcaaacccagctgcggttgtattttctagttctctctggtgtagcttttttagaaactaaatctccagtctcatagctgtgtgtggcacatgggagtagtcagaggtcctcagaatgggggtctaattactctctagaaaggattcttcctgtttttggctcctcctcacaccctcaccttcagcactacctgatgcctctagtttctgagcttttctggaactctgtggggtgaccccacctctttttgtttgctgcttccttcttaacacatttaatttctggatttgtctactctgcctgcattcagctcacttcgcagcttccaaaaaggttgtcatctgtctcttttattgtcatctcctgttttctttcttttctttctttcttttttttttttctgatgtatgtcttttatttccttgactttcatcttactgggagtttctggagagagctgggctaaaagtatgtgtccagctcaccatagtgacctggaagttgcttattctgttttgctttacaacaatagaaaagttaacatattcgtgtatttcttcagaatttttaaacaatgttgttcttagttcctcttacttctaaaggacttttaagagtttttttaggtatttcatctttcccaattctctgtctgtgaccaggggtgaattggtaattttacatctttttttcaagcattccaagtagaggaggcaccccctgtgacttccagtggcattctgcagcaattaagtygcattcattcagctcatcatttaccttgcagccatcaactcctttcaaaatatccctttgattgtcagtaactacggacgtgaagctgtgggtttcttccaggaacaatgctcttctctgtagcctgtgttctcccagttttctgggaagccctgagacttgtcattctcctagcagctcagatgtcattctcctcaaacacccagatttcatttagcaccaacgaggtgctcagtctgggatttctgagggactgtcactggggagaggctgttgctaatgaggtgcaaattggcagcagctggggaggagctgctctcyccctctagggctgggccccaggggaggaggggagggttgctctgacattttcagaggaggttggtgaggggccgaaactagagactcctcaccctttagcaaggcctgatgccggctgggggaggcccttgcgtcttgctgagaggctggtctggtctcacacagccccacctccagagttgctgccagctggctaatttcttggctgccttttctggctggctttacttgcaagcaggagaggccatgatcagacacggggttttcccagacattggagagacagctaagaagacccacagcccccagagacactgtccttgggattggtgttctagaaggttatgaggttggggtttggtggtggaagaggggttactgtagcaactgttgaaacaagagagcccatccatctccccccagcatttgcccgcctgttttacatggaagagcctcttatgcattaaactgttcacctgagtgctcccaccagctgcgcttctctgcttctgcaaggtgcagggctctcacagccattttcatctgcaagggtctctgccagagctgtggcagagttttctgtgggatgaatcagaaactatgttctgatgaagagaaaatggagggcagtgggtggatgtggaatgtcagtaggtagttaagtggctttttgtctcctggtctgtctgacaaagtgtgctgattggggcctcctgctgtgagattcatttgggtgatcttgagcaaatctcttaatttctctgactttagcatccttcatcttttttctctgtatctcattttttctaactttttaaggagcacactgagtgctagcctagatgcaaggatgagtgaaatgaataaaatgcagtccctgtcctcacagaactcaccttctggtggaagaaggtggacatatgaataacatagacttacacatgatgagaaatgcactatgtcgaaggcatgcaagaagtgtcatgggatgatgaaggaaggggcaacgatgctctctgagagggtcagagaatgccctacagcggtagtgacatttgaactagttgttgaagactgattctgtagggggacaaggaatagtaatggaggtttgaaaaaacatggtgtattctagaaaagacaagttgtttgttgacactagcatgcatgtgcaggatgaactggcaggctgtggggctggcagtggactaggtcagatgatgtagagtgcttgccatacaatgagtttggatctcaccttcttggggatggggagttgtgctgggctgtgcagagaaccatgatcaaatatttgctaaatgagtaggctgggccatatgatcatttaagatcccttgtagtctggctgggcgcggtggctcacgcctgtaatcccagcactttgggaggctgagacgggcagatcacaaggtcaggagatcaagaccatcctggctaacacggtgaaaccccgtctctactaaaaatacaaaaaattagctgggcgtggtggcgggcgcctgtattcccagctactcaggaggatgaggcaggaaatggcatgaacctgggaggtggagcttgcggtgagccgagatggcgccactgcactccagcctgggcgacagagcgagactctgtctcaaaaaaaaaaaaaaaattcccttgtagtctgaagttcttggattttctgtgtgggtacaaagctgtgggtctgggaacacagcttcgttgaggagtgttatctggtgtaacgtctgtgagtaggtgtttaaatgtgggctgtactcaatagctatattaagaggtagcatcaagcagggagtggagcaccaggttcccagttaagctggagtttaaatatgcaagtcttgtttcagcctttgatcgtgcttttgaccatggctaaagcacttaatctgtcgaagagccttaggatcatcacctgtaaaatggaaatttccacttctgtgcagttgggagggctttttgtagaagctttatttgacaatgatttttctgttgcttaggtcatttgaggggaaaaacattattttaaagtttaacgttatttctaattgtcttaggaactatcaacatacatggaaatagaaattatctgtgtattgatttgtgtgtaatacacttatgctgagtttttcctgagtttttgatccatagatagataggaatctggtgggagttggaaatatgggcaaaaaatggtgggagggccaggygcggtggctcacgcctgtaatcccagcactttgggaggctgaggcaggtggatcacctgaggtctggagttcaagaccagctgaccwacatggtgaaaccccgtcactaccaaaaatacaaaaaattagccgggcatggtggcgcatgcctataatcccagctacttgggaggctgaggtaggagaatcccagctacttgggaggcttgaacctgggagtcggaggttgcagtgagctgagattgcgccatgcactccagcctgggcaaaaatagcaaaactccgtctcaagaaacaaacaaaaaaattgtgggagatgggaatatgtgccaaaatggtgtgacaggagctcagttcatgaatgtacagatacacaaagcttaatggtccacttgagccatctgaggagtgcacttgtgtggttgatgacacatttctggactcctaaatattagtttatgcttattgaacttttgacctagaggattattatggaatggaatcacatgatgagcagtttggaccaacttcagagcaattctaaatctctgagttgcttgtttgctttcgggttgggtgtatttccttcaattttgtcttagaaggtttttagcttggtagcctgccatcttctcaaaatattcccagttagctcatctttgtaaccaaatggaataaacggtttctatatgattctcatgctgtaagacaatgtcattgatagtgtgtagccaagtaatggtgaagccaataagaatattcaaaatatggagcaactggtactggttgtggatgactgataagttcgtactagtacatagtgtctgatgttagcccctgctgtggctaagaaggcctgggacacatatgcataggaataaaacagatgtggcatattaaagactgggtaagaacgggtaagaaaggcatgggaaggtaccttttagcattggcctcactcagatacagtttgcattctctacattcataggactcttatcattgaaataatccactggtatctgcagattgattttccagtaggagtgatggtcagtgtgacctaccaaatatcctcacatctggtctgcaagggctttattaatcactagtgaaattatgaccatggtctgtgactataggactgtattgggggaaggtgagtcacaattcgacagcaacagtctttacttgttctatacacataagaaaagtactcattgaagagtatgttttcctcattctgaactcaaataaacactttgttattattgaatgtacgtcacttatcacctttagtattatttgagagttataggtatatatatcttgtggcctctaaataattgtaaaatcctgagggcaaagtagttaattcattcaataaatatttattaagcaccgagtatgtgtcaagcacctactgtgtgttatagacactgaatacaaatgaattagacaatgagacactttgaactgatgacactttgaatcgaattgatgaaaggatgatggggaattgttcagctgaagaggggtgggaagggtcttctacaaaggtcaagaggtcagcataagcacaggtatggccatgggaaatgacttggctgattaggaaataaaaagcaagttggtaaccgagaaatataacatgatcagttgggtcaagaagtgagacgagaatgataacagtgtttatcacttaaattgtcattttagtgttgctattcagtgagggagattttgtcataactcctgggatgctactggcatctagtggttagaggtcaggctgctgataaacatcctgcaatgcacaggatggcccctcacaacaaagaactctctggtccaaagtgtcattagtgccaaggtcgagactcccttcttcggatctttttacatttggattgcatcattcaggtcttaactcaaaagttccttctttagcagcttccttactcaccccctattgtcatataaaaatttgcctctccttctctgtcactctctattacaaaacaatgttttttgtctttataccttttgataccatctaatgttatattatgcatttgtttatttttattatctgtctctcctcttttaaaatataagcaccacaaggtctttgattggttcactgctgtatctctagagcttagaatagtgtgaggcacattggaaaatgcatggaaaagttcaatatatgggtgttctgagtggaagaatgtggtaagttggacatagactctgagttcctggaataatcacagtagttaacattcatttttaccattgatactaggccctgttccaagcattttgcatgtattaactcaatccccaaaacaacctcagggggtaggtatctgattatttccattctacatatgaaccaactgagaaagagagttattttcccaagatgtacatctagcaaggggcagtgttcaagaggtaaattgcccaaggtgatcttgtgtgtttattcacacatgctttttgtggctattagtctgagaatgctatggggagttgggggttaagtgacttgggaattggatttgaggggtttcaaacaatgcatccaaaacatagatggacgggaaatataatgaactaaatgttggtcatatcgcactcaagggacctgtgagccatcaaggtgaaggctaacatgaaaaggattctctcattcaagagaatggtttcagatgaagtgtggaatttgtaatgggaactgaaatcaggagagcagacttgattatttagggacaggttgatgatgggaacagacccagggaacaccctgacatcacaaatatataagggcctataatataatataaaagggtacccataatgaaaatagaaagagcagtagagtcacatttcaagttctgctttgggcacaagcttctatctaaagtctcttttctcccttgtagaactaatcttttctctctctgttctacctacagtattttatattttcaatgtattaagtgacataagagaggtgttagataatagctagtactacgagtgtcacctaagcccgtaaacttccacaggcctacatcttcatctttgttcatatccatgtccctagcgtgaacatccatagctgacatctagtagtctttcaatattaataaatagatgatgttgaatatgtgaattagaaaatgtttattgggagaataaatgtatcatttcattagaaaatttgtttgtaacccacatcaaaagaagaagaagaaatgtgtagatcagtgaacttttctgttgttttttctatttcaaaatacactcaacccccgacttcttaggcaagccatttagctaatttctgaaagggagcagctaatccagcaccaaagcctgtgcagaagctgggccagcaactcaaataagatgattttctgagaatgaccagccatgttggcttcacatatggaagacgagtttctgaattctccctcctctcgggtggcacatggtgtcttctctttctagctgctccaggacgaaggaggggggatgaatttttaaaagattcaggggaaggaattcaggttctagaaatatccaagaaaagtaataataaaaccagtaattctacttttatgagccaaaggtcaatattatttagtttttttttttattttttcctgggaagaaaaaagagagctgatcttttgggtaattattgatatttccatgttttcagcaggattcaagttagccaaggagaagcataatctttcattatccaaactggagatgtcttgagtaatccagtggcaggaattgctgctgaaggagtgtattttcttttagttcatctgcctttttgacctaaaaccagcgtaccatttttttgttttaaaatatacgtgatatacatacatggtttgtctacctctggaatatttataggctcatattcctttctatacttgttctctagcgggggtgcttataacatttaataatacttacagagtctgtttcttagtctcatttcaaacctcaatgtttgtgccaggttgtttggagcagctcaagtctctgaggttattttcccaagatgtatatctagcaaggggcagtgttcaagaggtataatacccaaggtgatcttgtgtatttattcacacatgccctttgtggctactagtctgagaatgctatggggagtgggggattaggggccttgggaattggatttgaggggtttcaaacaatgcaccccaaaacatagatgggtgggaaaaataatgaactaaatgttggtcatttagtccattattagcctcagagaagctagaagctcttaaaatattcaagagtatgagagattcaacccttcgaagagaagaggagttgatgatggaatttgaatcgttttttggcatttctttactttataagaacacatgacggtgttccattccagtgcagaggagctgttcttaactcttaaatggagagccctgctgttagagaaaaggcttcgtgaaggctcctgtgtgtggggtcatcctactctccgggtggcttcctcctcccattcctcaccttcatccatcactgtacttgcacatccatcctttcattctgctctggagatcctttggaaagggagaatagaaaggacaaaccattgatcgatagaggcagtaaagctgtcctttggggtttcacaatatgtcctgtactatttttgtgtttagcaaaaatccattttgcctcattatgagcctgttttcccttgggctttcacttctgagattatttcaagggaaattatgtctatatattagtctcatttgcccacatctcactcaataactattagcgttattagatatcctgaaccaggaagctgcattttgccagcactaaatgcagcttgaaattcaaagattcaatttggagaaaaatcactacatttgagtgggttaaaatcttgccaaaaatgcatttttccatctgtctcatggcaaaagctcttttaagatttgaaatttatagctaaggacttccagtcatctttgcaaagtggtctggaactagagaatatgataagactggaggtacttgggagcattcctctgaggtggaggaaggagttgacatcagtttctttctgttttaagtttattgaatggtggacatcctcagtatcaaatgctgtgaagtcagcaccagcacactcaacacccaagggggtggttcacaaagtgcatccatagccctgccaygcccagtgtgacatgactgaaagtgatgatcatggtcactttcattctttcttcctgacctgaatctgcctgggaatatgaacattgggttcatccttactgacctactctaatacatacaaagaaggctgtcagcttgccaaacccaaacaagaaatcagaggccaagtcaggagttggttttcagcctcttcactgatgtgacccaggagaagtgatgctcccgagagtgactgtctgcactttgtcttagcagtgctgatgagaccagtgagcactagcaccatcaccagtgagaactgtacctggtccccctaagtctgttcctgtgtgggtggaccctgcctcttagggttgttcctggtctatttactttctttaaacagaggaactcccttccttctggttgcatatcaacttgtgtctctggcatactttctcagggtcattgtttggggctctgctctgttgacttcttgaccatttctgctgttctcgcaactgatgctttctgtacttcggtgcattgtgcagcaatgatttgagaggttcagtcttctctcttacacatataagacatcctgtattgttattgcctcaaatatgactatatacctaattagtatcacacaaaggcgcaacatagcttagtgagtagaacacaggctttaaaagtcaaccttcttgggactaaatatttaccactttccaggtctgtggagtcaggcaagtgatttaaaatctcttggcctcaatatccttctttgtaaaatagagatattagtatagtctgtcacatagggttattgtgagtgatgattaaatgaattaatatatggaaagggcttggaatactgccatttatgcattaagatatcaaattttagttacagtgatgatgctaggggctcagcataaggacctcaaaattgcgcctgaaagggcagggtttctttatcagtcatcctgccttggcaccttactgtcctctaagactctagggaaatataaaacaaaactaattaagaggttgagtgtaagctttgctacagttaaatgcctcccgtctttataggatatagaacctagatgatgatgatgatgatagtcaacatttattgagcaattaccatgtaccaggcctgtcctaagccaaatatgtaatcatatttattcctcataaaaaccatatgatgagaagcttatctctgttttttagttgaggaaactgcaactcaaagacttggagctagatttacacccaggtctaactatgaataatcattatgaactttctcctttacactagactggttctcctcaaaacaggaagcctgagggaatggaaagtgaagggcatctccctgggatctagtcctttgagatgttggactttgagcaagctacgcaacttccccaaagttcagaattttaatctgtaaactaagataacagctatttcacaggttgttgtgagggagacaaaacaagctaaaatatataacaaagcaggcaaagatgtatacttcaagagtcactacctacctaggctggggcaattagaaattctaaatatatgtacataagtatttagcaaagwtatatacttcaagagtcactacctacctaggctggggcaattagaaattctaaatatatgtacataagtatttagcacagatgataaaggatgggcaattcattctgagattaggctgtagttcttcttcagtatggaatcagagctcaattatctttaaccattgtgatttggggaatagttttggtcctaattgggtgtacatgatgcctttgtcttcagaagtctgatcaatcaggggatgctgcaccacaacccttatactacgttttagtgtttctcaatgtcaagagacttctgtaacagatttcagttctttctgatggctttgaaaaatgctagtaattctctgtctttctaatggagtattttgtgtttgttgtctcctgaggtcagaaaattactttggggaagttgacttttgtgagctgtgagtatggtgtgtgtgtgtgtgtgtgtgtgtgtgtgagagagagagagagagagagagagggagagagagagagagagaaagagagacagacagagagaattaaatctgtattgttagttcttggttagaatagagcttaatggatcttcccatttgtgaaaaccccataactcttcctgtgtaatatcattaaagagcctcctgacagcagtaggtaaggagtagctctggggtgttactttttaatcactttaagcccattttcgtgtgttattacagaaccatccctcttctttatcactgcatcttccaatagcacaccattgctccaggaccagaattcagcaacaattttagtttttctgttgacaataaatatgttagcctgactgatcaaggctgatgcatgagcttgatctttgggattatttccattctacatctgagtacatacgtagaatgtactacgtaagatagagccagttctgccaactgtctgtggttgtcataggtatgcttcatcaaatattctggcgcatggtaggtgtacttcctggctttgtatatttgagtggkgccacctaaccagttctggacaatatgttgtgattggaagtgatgtgtatcacttgtgggatggaatgtttatttgccacaaataaataactaaaaaaaaaacttctccagggatctcttttccttctgccacagttacatcttcttaattgtcagcctgggtccagaaagccccagccaattctttatagacaggcagtgctagatagacataaactgctgttattttaacaagtgrgatatgtcttatgttcctacagtataacctacttcatctcgactaacacaatgatccatagtcagggacatgtgctttttggtgagcagtcaaggtgtggccttgatgtcccttgttttctctgctttgcctttactgtgaagtctgtctagcagtctgagaaaatttaagaccctaataatagatgtcttggggcaatgaaacttagtacctttcatagtttcgttttcttttccttaatttttttttctgtatttccttgtaccagccattaatgttttgcctgtcacatagcagccactcaataagtgagtgatgaatgaatttgtacagaaatccattgattggtagggaacaattagcattagcattatagaagtgttttgattctccctgaacttattgttgtcaattactcttttactcaattcaaccctaagtcatactgttttctatttccagggctgccctgatgagaggtagctttggcctatcaataggtgcattggcctctctgagacagcagcacaggggacctcagccttctactgcctacactcagcaaacagaaatatatgaggctcttggctgtgaaagcagaagaacctcttactcctgcaccattttatggccaaggccgtagcaaactgctgactccagagaattttttcacctttttttttaacttatgtggatttttttttttccaactgggttttgcgctgttgctcaggctagagtgcagtggtgcgatcatggctcactgcagcctcgacctcctcagctcaagttatcctctcacctcagcctcttgagtagctggaaccacaggcacacatcctcatgcctggctaatttttgtattttttatagagacagggttttgccatgttgcccaggctggtcttgaactgagcttaagcaatctgccttccttggcgtccaagaatgctgggattacaggcatgagccacagcacctggcttgtagttttaactaaactaaaacttctctggccctggagaatttccctttctctaaacttacgcatatcaggacatgcctaaagtgtctattttatgataaagtgatgagaaggaaagagacaagggttaggacagcccgagactgcaggctgatacctggtggcaaaatactagtctcttaaacactaggcacatatcctgcccaattagagatctccctggaatcaattccttctctccattcctcctgtcattgcttcagatcaggctttcaaatctgttgattacactattaaattagaactgtgccygagacatcaatgagtatgagctattattatctttattattgctattctgtagcctcctgttcccgtctccagtttttcttcatttcaatccatactgtgtatcttttaaaaatagatcagattctgtcatttccctgtttataaagctctcttgcctccactgcctagaggataaagccctaaagtctgagctcattgtacctcttcagccatgttctcactcatgttagctgtatctgaatcatcaagraagcttgtcaaactctctgtgccccaattcttttctccaagagattctgggaagcttttgggtgatagggaagggagatatgacacattcctgggggggtgtggagtttgagaaagctcccccagtgattctgaggccacttcttccttacttagccatccccacgtccacagctagaacctctaatgttgccatgtgtaatgttggttccagccacgccaggcttctggagttccttagtctcaccatgatctttgacatcctcatggtttgcaggtgtattctcatcactctttatgttcttcttcctttttctgctcgggtctctcccatggttttttaatatttcatttaaatgttagttcttaggcctttcctgatattcccagatgactgtctgtctcctctcatggcatgttgcattgacctacattattatccttgttatattgcagcctcattatttgtgcctgctactgcctggacagtgggggctaggggaggcaggtgcctggttctgtaatcttctgccagatttgaaccragtttggtgcatagcaggcacttaatgagaagcacactttatgaggcagcactgtgtgatggttgagtctgggctttggagtcttccctcttggggaccttgtgacaagtaaatgaaatactgtaaacaaggcacttagcctagtgtctggctcttaataaatgcacaataaatggcacctaccatttttttgaaataaatattttatgattaagtctgtatttataagattaataagtctctcatttatatactaatttccaggatgcatagatttttcatccagatagtttatataccagcaaaatgggaaataacaacacctgacttttttactggaaaaatattggttgctgtggagattatctactacgttgtccttactctcaaagagattacagttaaaacacaccaatatcaacatgaacaactrggaaatagcaatgagccaatcacagcagagatcttaattggcttcataacaaagtgtggtctgtaagccaatgggaatgaaaggagaatcaataaatcccaagagacgagagttgcctttttgggggacacagtcatacacacacctatattcgctctggaggaaaaatggtggcaagagggtgtatgacttgatgagtgggggagacatggtcaaggggacaggcaggcaggtgagagtctgggctgactctgggttggtcctagtgttagggccatgccactcaaagtgtgtttatggacagtagcagcagcagcggcacctgggagcctgctggaaatgcagactctcaggctggccccattattttttccagtttctagtttcagggcttgcctgatgggagacagccttggcctatcaatagctgcagtggcttctctgaaagagcagcacagagaacacggatggactataatctgcattttaacagggtccccagatgatttgtgagcacgtgaaagtttgagaagtgctggcccagggatgtgcagtgacttggatgggccctatttagcgctctcctgtgagctgctggaacaaaatagagggtacttaaaagcatatgcacttccactgtaggcttaaaactgcagaaacgaggtagctcgtgcataaatgtaataattctttgttccaaatgtacctagatgtcattatgacaaaacataaaatccatttggaactgttactgattcctagcagctttttgccattagacattttccaggcatccaaacctaaaataacatggatcttgggtgaaggtttttgaaatgccttatattaaaaagtccttgtatttgaaaaccagtaaagaagtatttgggaaccattatrcgttctttcagtactgcatatgcagaatattttgggtcttcacagatagacttgtgacgcaaaaataaaataaactatctcgtaatcacacagaacagatcactgacatatatggcaagctgttgcagtgacccaggattaaaagtttagcatagttcttaaatgtgtgcctcatactgcatcagctccttatttcgagggctcatagtggatgaagcaattacctggatggccctgtttcttgccctttccctggtcttctgccacgtaggttggtggtgatggttgggaaatgggggtggcaaaagtgtcctttatggattttatacagttcttattccactttttggtgggtcactggcctggttgctgtcatgcatggtggggaggtgggcagatgagaagcccagctctattgccaatcttagtcctgagcatagatgcagaggttcaggccgggtgcggtggctcatgcctgtaatcccagcactttgggaggccgaggcgggcagatcacgaagtcaggagatcgagaccatcctggctaacacggtgaaaccccatctctattaaaaatacaaaaaattagccgggcgtgttggcaggtgcctgtactcccaggtactcaggaggatgaggcaggagaatggcgtgaacccaggaggcggagcttgcagtgagccaagatcgcaccactgcacttcagcctgggtgacagagcaagactctgtctcagaaaaaaaaaagaagcaaaggttcagtttctgatattttgtttccaatcatgtggcattgacactggaatcagctagacctgcattcaaatcctgactccatcacttaagctgttgtgtaactttgggctggttacctcactaacctctctcagacctctctcagtttcttcatttgcaaagtggggaataacaacacctgatttagatgcaacgcaagttgcaagtcattcagcatttactcatgatcagtgagagtcactgatatctccgtttttctcgtttcccctgccttctaaagccatcaggtggggaccttcatctaccaaacagacgctaaagaaggatgggcacggtgagtggaaaaaggaggttgaagagttgtttttgctcccaagtgtttcataatgaatgaggttragaagagaaaataaaataccctgtccccttgctcttatctggctcaaatacagcctgtattatttagcgtcaaagaaattatcttctcatgctttgttcagaccactccaactcatggccacagttctgacactggcttagccttggctgacctgtatgaagtcaaataagttccttcacctttcttaacctcagtttctttatcttgaaaatgagagcatgaacctttgtgatctctaaggtatttccaattattcagttctaagagattatgcccatctgagaacaagtggaattaatgttatgaagggtgccttcaaaggagaaatgcttgagatgggagcaagaatagatgcaaatcatgcctgtttttgagctcgggaaagctttcatatggcagggttttatattcatctgcctggttgcatgcttatgcactgcccttgtttggccttgaagaacatggttttttccattgtttctggtggagataatcacaatgactatgtcacgtctgcttgggaaaccaaccacggctgctgatctttggatccttgtctgggaagctctcaagccagtagtagtttgcctcaaccattcaggggtagctcctctctggccaggaccttgttatgccttccctgcagacagcgtaagggatggtaggcattctttctccattcgctccctcgccagaatcagcactggtgattgtcaggcaggtaaggagaacactgtcatgctcaatggagatgtcagactaatgtgagtcagctctagcttccctcaagcacagctggaagacaaagaaacagatttactggagatgtgcacaaactagtgcctattatgttaaaaaacataaataaaacgagggagaaggcatacagagagaaattatcttttaaaaacatcttggcaaaatagcactcaatacacatcagtacaatagtggagtcatccatgtgtgtcaacctgtagttcttaatgacagggatgtataaacaagtaggtaataagcagcccagctgcttctggggtttctcttaacttactttctttgaaaatgagttggtggaaatacagctgaaaacacagactcagaaaatgaatgagtcatttgagttgaacataaaaaaggagacctggatgaggatttagagagaagatccattcaactcygtaagcctacaaagtaagattagactaaatagatagaaattttattctactcccaaaggataaacatcattttccatttctttttgtagacaggcaaagctctgccgtgaatcatggttttaatgcagacttctttacagaaaaagaaatatatccatttcctttcctttcctgtgcccatccaagcttgttatcgagaggagtgcctctgtaccctctgtcagctagaatcaatgttaaacactgagcacacaaacaccaaaaacgtttacatctttttatttttcttcaaagacttcaaaactgccttgcctttgttcttacagataatttttaatagctggtctagttgtatttatgttaaatgggggcacaggggtcaaagagacttattaaaaggacggaatgagtgaaggacttctcttctgacgaatgaacagggcatcgagccaataattaaatcttattgaagcagagaaaactagcctatatttatatgcctagaatgttctgagtgctttcttgtaggatctcttttcaataattgtaaagtggtaattttcttcattttcctgaagagaaaactgatgctcagagaggctaaataactgcacaagctcacatatccagtagagagggggaagagatggaagtccaaagtcaatgccacactgcttcctatttaacaatatcaaactcaggcatcaagctcctgctctatgccaggcatttgctgggtactggagatgtgaagagagaatggtctaagcgcttactgttgagtgcttcccaaagcatgtgctcagtgtttgctggttgtcacttactctcacaaaggagctccctcagtctagcctcagagaagataattgtgcaaagtgggcatgcttgttagcttatattttcagaaaatgaaaaacgcatgcccggactatttacctcacgaatctaagatgatatagtgagcgggtgttagggatgggacctgggccaaatccaaataggttatgcatttagccttcaaatccttgctgtgttccaatgtccgtttaaagcttgttaaattctccaggatatttgatacacacttacttaatatgtttcatttgcagaaatggttgtattttaattgaagctcctggaagtgaaactgcgcttttgtaagaaattcttaagtaagtggaggaaaacattgtgctcaggaaaagttttccagagacttcaaaatgacatgaaatgttaaggccgtgtccagtcaagatgcctgtatataaatgtgaaaggtgcattgtcttagtagacatcataaagaaaaatagcatcaaaaagaaagaaaatatcatacagctaaacaggtgatctaaataatatacataacttagaaaatgtgaaatcagtggataggattcatatgaggatctttttaacatgtttcctatatcagaatcaaaaatacagttccagtcacattactttcttgtttgaaaacattttttggctctttgttactgacctgtaatttgtctaaactgtatactggaatgtaaggcctctgaagagtgatcacagccccctttttcaaacttacctccatcttctctacaacccagcaaaactggtctcctcactgtgtcctgaatttccttgttttgtctcacctgcgttttctctcagcttgcacccctccatcccttctctccaaatgtagaaacctttaatcgctcacttgcttctccaggatgcatttatggatctttccttaatgcaagcgacctgccctggcctttcctctggattcccttttgtagtgttaatatttgcatagtgattcttattttgctttgctttgtattcattatttttagtgcttgtcttattttacctcctaaactataattttcttgagagtttttctcatctaatttttttgtctttgtagcatttggcatagtgcttcatgaattgtattaatgaacatcagtaggtattagttaaataaaattcaattaaataaaggccagagtaagatgtgcagttggaacagccaggtgttagattttctctgactcagagatgaacagcttcccagcaagggaagaagttcraggagagaggccggtaggagaggaagccacttctataatttggcactaataagaaatttactctggaaaatctcagtttttcacaaaccatctttcacttttctcatgatggagaatatccctttattagtcaggaccttctgcaaattaatgggcaagtctcatgtcctcataaagccataaccctatttatgacattacaattggttacttagtgataattataatgtcacaaatagaggattattatgatttgaggtgcaaaacagctgtaacaaagaaagtcagcaataagtggacatgatgtagtaaatttgcagctggaaaagaataattcccagaaagatattaaaaatcattttaatagtttttggggaacaggtggttttaggttacatggatacattcttgagtagcgatttctgagattttggtgcacctgtcacccaagcagtgtacactgtacacaatgtgtagtcttttatccctcatccacctcccacccttccctctgagtccccaaagttcatatattatccttatgtctttgcctcctcatagcttagcttccacttagagaacatacagtatttggttttccaatcctgagttacttcacatagaataatggcctccagctccatccgggttgctgcaaatgccattgtttcattcctttttgtggctgagtagtattccatgctgtaattataccacattttctttatccactcattggttgatgggcatttaggcccattttatatttttgcaattgccarttgtgctgctatgaacacgtgtgtgctcgtgtcttccaaaaatgcatttttttgcataaagttttccactgagtgatggggcaggggggcacatgctaaagttgaagcttttgccaaggagagagagctgagggctgcaattcttttggaggatgcttttcccagccacaaacccatattgatttcttccagaacatttactaatcctctctccccagctctcacccccagtgggtgcaagcctgtgcatataaacacactcccttgtttcccattcaggatatggaatcttatacatcataaaagagactgatctccatcctgattcataggactgtcagcagatggcagagagagtgataatgccacttactatcaggtcactccgaattattatttattctgtggagagtgagactgaggactgaaacctgatgtttaatttttcaaaatcacatggttagaaactggagggtcccaagctttctggtcctacatctaatgaactaatgcttttgttgtttatttttgcactatactttatagctatgtaatgatgtaaaggacacagttgttttatgaaatccatttccccttgctccttccttttgaaaccttgatcttttttttctctttctagyagctaatgagattcaggaaagccgatcccatttccaactccagggagcaagaaagtataatatttgaccttccagcctcttagcatcagctggtacttccttcttttctcttcctgagccatgagtcatgcttcatcaaaagtttcccaggctcctgaagtgaaaatgacaaatcagtgcataagagtgataggaagagaagtacaagattgtattagacagtatagaacaaaacactttgcagaatgaaaaattgcagagtgctgacacttgttctacagaaagggcatcagcacttagatcactgttgaacaacattcattttgggatgaatattgtctaaggtgaggctgaaattctttgcttcaaattctacaaaattcttattctacagaatggtggattatttagctaccaaactttactgagtatatagttattgaggatcaactgggagatgcataattgggcatcatgagcattggatggagcattgggtgggggcagaaaatgttaaggtcatacttgaaatatcaaagtgcacaacctaggaatagacttcaatatcaacaagatttgactcagctgaatctctgttttgccagtcttttctaggtctagttttatacctgttaaacatgaacattaaaacatttcactctgtgttagtcagttcttgcattgctgtaaagaaaacctgagactaggtaatttgtaaaaaaagatgtttaatgggctcatggttctgtagcctgtacagaaagcatagccctggcatctgcttctggtgaggcctgaggaagcttccaatcatggcggaaatcgaagagggagcaggtgtctcacatggcaggagaaggagcaaaactgagagttggggggaggtagcacacagttttaaacaaccagatctcytgagaactcactcactatcctgaggacagcaccaagccatgagggatctgcccccatgacccaaacgcctcccaccaggccccacctccaacactggggattacatttcaacaggatatttgggtggggacaaacatccaaaccatattacactccttgcctgtaaccagtgagaacccatttggctggtatatcactccagtttgttctaaggatgtagtaggtatttgccaattctgttgagcaacaatctcaactccaaccttgccatattctataggggggaaattggaatccccaaatctcttgggtacctgagatttctcattctccttaaaaggtcctggttgtcctaaagcaaccatgcctcctatccctgccacccctggtatttgcttcctgttttatttctaacagttgtctagagagaaccgtactgaaaaactgaatcaggtgatttctaatgccattaaatacttaaagttagcatagaactaatcattatagaagaagatttcaaaagcttcaaatacatggttcataatctcattgaattaaaaagctggctaaagattcaaaatggacgcacctaatgggacagcaaacaatatctaagttgtatgggagatgttgtaattaatctctcatttaatcatcctttcattcaagcattcctttgattggtagatgaggctggctggcttacatcagaagcagattttgatcagttttccttaggaaagcatgtgattgacttcttaaccaatccagcccaaaatggatgaaccataatatcaaaataatcacttttaaaagagtaaattctaggcagaataactgttctcagtatgttcttatgaggagttggactggttttgttaataatgacattatgagatacaatttatataccataaaattcatccttttaaagtgtacacttttgtatattttagtgtgttcacagagtttgactatcatcactactttcttggcaatcttttaatcatcctcagaagaaattgtgtacccattaatagtcacttccccgttccccacagtccctggcaaacactaatctactttctatctgtatattggcctattctgggcatttcaaataagtggaattatgcaaatgtaagtttttgtgactgtcttctttcatttaacataataatttcaaggttcatctatgttatcggatgtatcaggccttccttccttgtaattgctggatattattcaattgtatgaatataccagtactgtgttgaatagaagtgatgaaagaagacatcttttttgccttatctaagagagaaaacattcagtcttttactattaagtgtgatgttggcagtgagtttttttaaaaaaatagatgtcctttattaggttgaggacgttcccttatattcctagttttgttgagtggtttttaatcatggacagatgttgggtttttacaaaaatgctatttctatgkctattgagatgatcatgtgggtttggtcacttagtctattaatatggtatattatattgattgattttactgtgctaaactaaccttgcactcctagggtaaaatctccttgatcataggtataatcctttttatatgttgctgggttgggtttgataatattttgttgaggatttttgcattgatgtatttaaaagagtctggacacagtggctcatgcctgtaatcacagcactttgggaggctgaagtgggtggattgcttgagctcaggagttcaagactagcctgagcaacatgataaaataccctctctacaaaaaatacaaaaattagctaggcgtgatggtgcacacctgtggccagctactcaggaggctgaggtgggaagatcacaggagcccaggaagttgaggctgtagtgagccatgattgtgccactgcactccagcctgggtgatggactgagatcctaactcaaaaataaaaaataaaaataaaaaaagcagatatcggcctgctcttttcttttttgcgatgcttttgtttggttttaagatcatgataatactggccacgtagagtaggttgaaaggttttccttcctctttcagttctcacaagattttatgaatgattggtatgaattctttaaatgattggtagaattccccagtggagccctctgggtctgggctttccattgtgagaacttttaaaattactaattcagtctctttggttattataggtctcttcacattttctgtttttttctttagtcagtctcagtagtttatgtctttataggaatttttaaatttaatctaggtcatctaattagttggcatatagttgtttatagtattcccttatatttcagtaagatcagtactgatgttcccccatttagtaatttgagtcttccttctttttttcttggtcagcttagctgagtttttcaattttatttattacacttttcaaagaatcaacttttgattttgctgattttctctattgtttaagtcctctctatttcatttatttaggctctaagttttattattttcttccttctgtttgcttttggtttagtttttcttcttctagtttcttaaggtgtgaggatatattatttgcttgaaatctttctttatattttttctccattctttcattactgtcttcttttgtgttaaacatctatttcctaatgtatcattttaattatctcttccacctatttttgagttactttattactgcttttttctgaggattacatttgaaatcctaaaacaatgtagttcaggttaatatcaacttaattttaatagttttcaaaaacttagttcatatacagctstgtttccttctcttttgtgtaattattgtcatatcaatgacctctttacacattataactatatcaacattatcttataattattggtttatgctgtttccatttaaatctgatagaagaattataaacaaaacttattaatactgtccttcatatttacctatgtggttacctttattggtggtctttatttctccatggatactcaagttactgtaaagtgttccttcattttagcagaagggttctttttagtatttcttgtaggatggatcttcttatgatgggttctctcagtgtttgattatctgggaatgtcttaatttctcataaaatttgaagaatagttttgctagatttggtcttcttgctgacagtccctttctaccagccttttaaatatgtcattccttctgactctggcttccatgttttaggataagtcagctgttagtgttattgaagattgctggcatattatttttctcttgctgatctcaagattctgtctgattcggtttttgacagtttaactatattaaatgtataggtatgaatttctgagtttatcctacttggaattcattgtgcttcttagatgtatagactaatactttttattatttaggatattttcagactttattttgtcaaatacactctctgtccctttctttcttttctctccttctggaactctccttgcatgtatgttggtatgctggctcatgtcccacaagtctctgaggctttgtttattttccttcattcttttctgtttctcaaactggatgatctcaattgccttatttccaagtttgttaattctttcttctgtccgcatagttgtgctgttgacctccttcagtgaatttttcatttacgttattgcactttcgaactctagaatttctatttggctcttttttaaatgatttctatttctgttgaaattgtctatttggtgagacatcattctcatattttcctttaactctctaggcaagatgtactttagttctttgaacatacgtaaagcttttttttttttaaatggagttttgctctgtcacccaggctggagtgcagtggtgcaatcttggctcactgcaatctccatctcctgggttcaagtgattctcctgcctcagcctcctgagtagctgggattacaggcatccaccaccatgcccagctaattttttgtatcttttagtagagatggggttttgccatgttgatcaggctggtcttgaactcttgacctcaggtgacccacccgccttggcctcccaaagtgctgggattacaggcgtgagccaccatgcctggccttaaagctttttatttaaaactttgtgtaaccccaatatctaggctttctcagaggcagtttctgttggctgtttttccttcatgtgtatggaccatgctttcctattttactatgtatcttattttttgttgttgttgaaaactggactgttaaagtaatataatagagcatccttggaaatcatatccttactttttgtttttgttgccattactagtagtagtagtagttgttgatgctgtgtgtttgtatgttttttagtgacttttaaaattctgtaaagtctgtgttctttgttgtgtgcagcatctaaaatctctgcttggttagcttagtggtcagctaataattggacagacatttcctcaaatttattcaaccaataactttcccactacttttttgtgatctatatgtgtgagttagagtatgcaataaatactttggtaacttgataactctaccttagcctttacttcctgctttgtcagccaaaagtgagagattggggtcttctcagatccttcctgggaatactcacagcttgcgcatatgcatggctttccagattcccaagaatatgtcagaactttccaaagctcccgtggacttctcatttcccatattttgatttttaagtttttcgatcagcttcttaatttgccgcaacagatagggccacctcaggcagctatgatattaaacaattcctgattcttttggaaaaatcccctgggtacagggatttcctcactgagtaatagctgacttaggtcaaatgaggataattccatgtgaatgagaatttcccagggagcttccaaacaagtacaatagtgataattctctgaggatgggccttttgtggcggatccaaacctattctgctctctccaatagctactaggccactggttttcacagctaccatctttctaaagctgctggttttcaagggtactgcagagatagggaaagggagatgggaataggaatagggtaggtttaagtatcacagagctcactgttctgtagaataagccatttttatttcaaccttttggttaatttttagaattctgaaaatgttgattttgacaatttttgcaactgctctcatactttcagggagcaycattctgtctggagtgcttctttttcctaggtggttttcatatcaggactgacttcttttgagacacaaatatcagactaggaagttgttttgtgagtacagaatcagaaaaagggaaatagatgtgttaaaaaggacgtagctggacgatgaagtctgatgcttgtctcctctttaggaagattgatatctgtgtctccaaggggaatggtatatctaatatttctgtgaacaataaccaccactaaatatttatcttaagtcttgagatcatgaaatgaggatgttggtggtatttgctgctgataaaacctgagtagatatctgtctcaacttagaaacctgataaagccagcagaacacaactgaggcagtaaagctttgggattgactggggactcttgagatacacttgctatccacttgctacttgaagtatggttcaaagagtgcagcatcagcatcacctgagaacttgtcagaaatgtagaatttcaggtcccactccagactttagtaagttagaatcttcatttcaacaaggtgatttatgcacacattaaagtttgataaatacatgcctgtagcatgtttacatcttcatgtggttgtcctgggaggattcctgcaatttgctagcttcatctatttaatgttcatttgtatcaacttaaatttcagaagtatctgctcctaaagtcttggagaatattaatctttgtacagtcttgtccttcttgtaactctttatggtaagaataaatagttgagcttcaagaatrtcagagagggagaaaatctgtgcaggctggaatggtccaaaaggcattatttgagttaggctttgaggaaaggatggggagaaagtgaatgcgtgtcatgcagatgaaagaacatgggccaacctacagaggtgggaattatttattatgtgcagtagaggtctaaactgtaacatttttggggacatgcattatgtcttgcttatatatgtatcctcagtgactggatttcatagatgctctataaattattttcaaactgaatagtaggaagattagtttaactcaaggtgagggtttatataagaattatgggaattgatgcaaatttattagcatatggctagatgatggtgactttgaaaacttggtaggagtttgtatttaaatttgttgggtaatcttcagtaagttacgtgggaatggaaggggactaatttgtgattattagaaaattattaacagattaaataactttattcaaactccagaaaataaagtccttcaaaatcttcttggctcttccagatatgtggatctttgaatgagaacatattgtaggaatcacattaaggagaaaaaaagttgaagaaatatggtaaacattagtagcccattttaatgttttatataagttcttaagcaggggaatgacatgtgaaaatggtgtttgtaagagattaaaatgtaggccgggtgcagtggctcaagcctgtaatcccagcaccttggccaggtgaggccaaggcgggtggatcacctgaggtcaggagttcaagaccagcctggccaacatggtgaaaccctgtttctactaaaaatacaaaaattagccgggcatggtggtgtgtgcctgtgatcccagctactcaggaggctgaggcaggagactcgcttgaacccgggaggtggaggttgcagtgagctgagatcataccactgcactccagcctgggcgacagagtgagactccatctcaaaaaaaaaaacaaaaaaaaggcagcaaaatgctagatggattggaaggggaagagaatgggtcaggtagactaactagggctttttttcgttatctagagatgaaggcagatggacagagaccaaggtaatgtcaggacagaggaacgaacrttgctccttgaagtccctagtattacaaagtagagacatctaattaagcagtttagcttttacacaaaaagaaaaaagaaaagaggaaagagataaactatctgatgcaatagcaataatagcaactattctttaccatcctcataagacaatggtgagaattaaatgagtgaatgcttgtaagttgctgtattaatctgttttacattgctgtaggaatacctgagactgggtaatttaaaatgaaaagaagtttatttggttcacggttctgcaggccatgcaagcatggcaccagcctctgctaggcttctggtgaggccctcagggagcttttactcatggcagaagcaaagggagatcagacatgtcacatggtgaaagagggagatgccaagttcctttaaacaaccagctcccatgtgaactaatagagtgagaagtaactcatcaccaaggggatggcaccaagccattcatgagggatccagcaccatgacccaaacacctcctgccaggccccatctccaacaatgtggatcacatttyaacatgagatttggaaggaacaaatatccaaaccatactagttgcctagaaaaatgcctggcacatggcaagcactcataaatgttagtgataagctattgttaactggaagaaagaacctcctggtgctatcgagtagcacttctgtttctcaaaatcagcacccaacacagtgcttatttgtaatagatgcttaatagatgcttaatgaatggatgaaggggaaataaaatatctctcaatgtaggaatgaaatatgttgattatagggtcacattttgctgttgatttctattatacatataatcccccaatggaggattgggggaaagtagttattgatttctcatattctgttctccaaactaactttatctctatctcattctctttctctctttgtccacacccatcctaagggatttccatctctatgcttgtgattcttggaagccggctccccctgtctgtgtttcatagcacaggtgctcagtcgacatttgtgttcattgctaaaccaatatattctagacctatggctcatgcctcagagcagtgctctcagggaaaaagacactctcttttctctgctgtatttaattcagtccttttcaatagtttatcctttctgaatggccactgagatgtttgatacagccaacttaatgagttgtggctaaactgctttattttatgtggctgaaatgtattcaactgcgcatgtgtacataagacttaatctctagacatttcatgataatttgacagcataattgaagtgagggggaaagrattgagtggtttgtttcacttacatttcttcacccacccctaaaataaaatattctctgaagcaaatgtcaggaacttcttccaccactgtcaccatgtgacaatgagttagggaatggaattaaattcgttatctagcgtctctttccaaagagctaaaaggtttttttgttcattaccagagcatctctccaacagaatagagaccttcccatatacagctgcagctgagtttcacacttaagaaatcttataggatcttataaattttaagggacatagctctacctgaaaaagtctgtagaaacctgaggtccagctcttctgattgccttgggtccttttatttaaagttggcttgccttttgtaatgaaacaagccttttctttagtgtttaataccaatgaatcttttggagaagatatgctagaaagattttgagcaggggtagagaatcttcctatgtcaggaccactgacccaccaaaataatcaggcacatttaagaaaggacaacctttaggtcacttgcaaaagaatgcaaacccattaaataagtattcttctagttcatattatggccagctgaggaagatgagagaagagatataggaggagaaatagagtggataagaaggaaagagagaaaaacaggagaggtagacacatacacacagaaatcaagagggatagagaggaggaggtttgtgagtactgaggtgagagttactgagatgtggtgcttgtcacatgccattgctcacttgggctggtttccttgctaatgagttgcttaagccttgctcacagctccttctacagcagtttttcaggtgaaaaaaattatcctttggactgtagcaacactgaccccagtggtgcctctctgagagaacagagaaaattaagccaagtgctgaaggttgcctaatcctttgaggggaatgcaactaacattaattgaattcttattctgtaggaagtgctttatagaggttatctaatttaatcttcaacaaatctaacaacaggcactgttatacccattttccaggtgataatacagtcattaagtgctttgtcaggtaacaccaccagttagcagggagagaatgggattcatgcaccagccatcttctgagtcctgctctttctgtttcaccagcygcatccacgtctctttctagagcttaaagaaatttcagaaaatcatccaagtttgcaaattggtagaaattgctccacgcctcagactgataataatttgctttattgattagtgcgtcattgggccccatgccaggcatctgagctttttatctatttaaagtagagcagcagccagttggttggaagtattgtacctacccttctttgacagatggctttctatttggcttttgaaattccataagaaagaatttcacagtttctcacagtagcttattgcagtcatatccagagtcagtcttcggatcatgaatacattgatcccttttctctggctttgaatgcagcatactgtcataggcctgggcgaaagagtggttccagtgtgtgtgtgtgtgtgtgtgtgtgtgtgtgtgtgtgtgttggtaatacacaatctgtaacatagtcaaagaagaaataaagagtcggcaaactatggcccatggaccagatctcgctggctgtttttgtaaataaagttttaytggaatacagccatgcttattcatttatgtattatctgtggctacttttgtgctacagtgacagagtggagtagttgtgactgagattgtgtggtcttcaaaggctaaaatatttattttcttgttcttttctgaagaagtgtgcaatccttgctatagattaacatatcaactagagaattcttgaaaagaacagagcatgaatatagcaaaactatggtgttacctaggtaatagtactatgaggatctactacagataatattttccaagtgccccttgttgtgtttgggggaatacaaagaggaggttctcttacttgtatgttgaaataactccttagaataaggttggagaatttctgataggaatgttgcttgtgtatcaaaatacagaattgcgcttctccgttctgactgtggttcttgtccaggcaagtttggaaattgtgactccttgaaaccattcaggcagccaagtgttccagctgatgttttgtgtgtttttttttcctccttcatttaaaaatacactttgtagaatgttttctttttcacggctccctaaatattctgttttgaaacatttaattacccaggttatttatatggaaaggtttgataatgtttctatgggagtctgttatttatttcttttgctaaatcttatcttatattaggggaagggctgaggttggttactatggcaacattctcaaaactgcaacaatcccattacggatgctaaaactatagtcatttcagtgggagggtagcatggggagtgggtggtagtctttttatttttattttattttttttwaaaaaacctctcccacttccaaatcttttgcattcatttattttaagctttgcagcttagggtactaaaatgagaaacaaaaagtaaaaaagagtgtcatgtctctctccattaaatttctgtagtcctttatcagctccctttgtggggatacccagttttctacctactcttttattcatttatgctttcagttattccccaaactttcattgagacctgtgttatgggtgaataagagaatccttgttcttgtttctccttttaaattataaattctttgaagccattaattcacttcactgtaattcatttaaacaaatacttattgagcaatttgnnnnnnnnnnnnnnnnnnnntgaagcacagagatgattgaaataaaatttgataaatgcttacacaggggcacttaatccacttaactccccagcctagaaagcatagaaatgactgcagggaggtgacatttgggttaccagataggcattttctggttagggcctagatgtgtgtgtgtatggcagggggatggaggtgtgtgtgtgtgtgtgtatttatgggtttgggtatgcagggcattccaaccaatctagaccaacaagaatagagatatacaggcgaggagtccttggccatgagcaggagaatttagaaaacacatggatgattggtagaagaacagtctggagacgtagccatcaagagaagtcatgtctgggaggttggatttcgacattgggaaccattgaaaagttcagaaggaggagcaattgagtgttccagtttagaagtggaagacagtgaagggaagggaagggggaagatgggattgggaagagatatggagacttgtaaaaatggcaagattcaccttgggacatgatgagttttaaatgaaccccatcaagttggaccgtccagtaggcagctggaaatgtggctccagaactgacaagaagtgtggatgggacccagagatctggatatgatcagagaagsctttgaaggaggaacaggaacctcaagagaaattacacattatcgtatccctaatatgctgtctcacttttagtaaaatattaagtatttctaaaaagatttttaagtgttgatgtgaccaaaatatttttataattttttattttttatttcaataggtttttagggaacaggtggtgtttggttacatgaataagttctttaggggtgatttctgagattttggtgcaccatcacttgagcagtgtacactgtacccaatgtgtagtcttttttcccttgctacccctgacagtttcccctgagttcccagagtccaatgtgtcattcttatgcttttgtgtcctcatagcataatagtgtccagtttcatccaggttgctgcaaatgccattatttcattccttttcatggctgagtagtattccgtctgtatatacaccaaattttctttatccactcattgattgatgggcatttgggctggttccatatttttgctattgcaagttgtgccrcttaaacatgtgtgtgcaagtatctttttcatataatgacttcctctgagtagatacctagtagtgggattgctggatcaaatggtagatctatttttagttctttaaggaatctccacactgttttccatagtggaactatgtactagtttacattccaccaacagtgtaaaaatgttttcattgcatccatgccaacatctattactttatggttttttgcttatgggcattcttgcaggagtaaggtcgtatcaaaatgcaattttgatttgcatttccctgataattagtgatgctgagcatttttcctgtgcttgttggtcatttgtatatcttttcttgagaattgtctatgcctgtccttagcccactttttgatgggatttttttttcttgctgatttgtttgcgttctttgtagattctggatattagtcatttgtcagatgtatagattgtgaatattttttaccactctgtgggttgtctgttaattctgctaattatttcttttgctgtgcagaaggtttttagtttaagtgctatctatttatctttgttttagttgcatttgcttttgggttcttggtcatgaagtctttggctaagccaatgtctagaagggtttttccaatgttgtcttctataatctttatggtttcaggtcttagatttaagtatttgacctatcttgagttgatttttgtataaggtgagagatgaggatcaagtttcattctgctacatgtgacttgccaattatcccagcaccatttgttgaatagggtgtcctctcccctctttatgttgttgtttgttttgttgaagatcagttggctgtaagtatttggctttatttctgggttctctattctgctccactggtctatgtgctgatttttataccagtaccacgctgttttcctaactgtggccttatagtatagtttagagttgagtaatgtgatgcctccagatttttttttttttctttgcttagtcttgctttggctatgcaggctcttttttggttccatatgaattttaggattgttttttctagttctgtgaagaatgatggtggtattttgatgggaattgcattaaatttgtggattttttttggcagtgtggtcattttcacaatattgattctacccactcatgagcatgggatgtgtttccatttgctgtggcatctatgatttctttcagcagtgttttgtagttttccttgtagaggtctttcacctccttggttaggtatattcctaagcatttcatttttttgcagctattacgaaagggattgagttcttgatttgattctcaacttggtcactgttggtgtatagcagagctactgatttgtgtacattaattttgtatcctgaaacattgctgaattcatttaccagttctaggagctttctggataactctagggttttctaggtatacaatgatatcatcagcacacagcaacagtttgacttcctctttaccaatttggatgccctttatttctttctcttgcctgattgctctagccaggacttctagtactgtgtttaatacaagtggtgaaagtgggcattcttgttttgttccagttctcagggggaatgctttcaacttttccccattcagcataatgtaggtggtgggtttgtcttggatggcttttattcccttaagttatgtcccttctatgccgattttgctgagggttttaatcataaagtgatgctggattttgtcaaatgctttttctgcatctattgagatgatcatgtgatttttgttttcaattctgttagtggtgtatcacacttactgactcatatatgttaaaccatccctgcatccctggtatgaaacacacttgatcatgtggattatctttttgatatgctcttggcttcagttcactagtattttgttggggatttttgcatctgtgttgatcaagggtattggtctgtagttttctgtttttttaatgtccttccctggttttggtattagggtgatactggcttcataaaatgatttagggaggattccttctttgtctatcttgcggaatagtgtcaataggattggtactaattttctttacatgtctgatagaattcagctgtgaatttgtctggtcctggacttttttttttgttggcaatttttacattactatttcaatcacgctgcttgttattggtctgttcagagattctctatcttcctggtttaatctaggagggttgtatattttcaggaatttatcctgaaatttatctcctccaggttttctggtttatgcacgtgaaggtgttcatagtagccttgtatttctgtggtattagttgtaatatctcccattttgtttctaattgagcttatttggatcttctttcttcttttcttggttaatctcactaatggtctatcaattttatttatattttcaaagaaccagctttttgtttaatctatcttttgtattgtttttttgttgttgtttcagtttcatttagttctgctctgatctttgttatttcttttcttctgcttggtttgagtttagattgttcttgtttctccagttccatgaggtgtgaccttagatcrtctatttgtgctctttcagactttttgatacaggcatttaatgctatgaactttcctcttagcactgcttttgctgtatcccagaggttttgataggttgtgtcactattatcattcagttcaaataattttttaatttccatcgtgatttgtttacccagtgatcattcaggaacaagttatttaatttccatgtgcttatatggttttgaggggttcttttggagttgatttacagttttattccactgtggtctgggagggtacttgatataatttctattttcttaaatttactgagtacttgttttgtggcctatcatatggtctatcttggagaatgtaccatgtgctgatgaatagaatgtaaagtctatagttgttgggtagaatgttctataaatatctgttaagttcatttgttatagggtatagtttaagtccattgtttctttgttcattttcgatcttgatgacctgtctagtgctgtcagtggagtattaaagtcccccactattattatattgccatctatctcatttcttaggtctagtagtaattgttttataaatttgggagctccagtgttaggtgcatacgtatttaaaattgtgatattttcctgttggacttgtctttttatcattctataatgtccctctttgtcttttttarctgctgttgctttaaartttgttttgcctgatataagaattgctactactgctggattttagtgtccagttgcatggaatatctttttctacccctttgccttaaatttatctgagtccttatgtgtcaggtgagtttcctgaagacagcagaaacttggttggtgaattctttatccattctgccattctgtatcttttaagtggaacatttaggccatttacattcaatgtcagtattgagatgtgaaatactattctattcatcatgctatttgttgcctgaataccttgtgttttttacactgtgttattgttatataggtactgtgaggtttatgatttaagaaggttctattttgaggatttgtttcaagatttagagcttcttttagcagttcttgtaatgctgacttgggagtggcaaattctctcagcatttgtttgtctggaaaagactgtatctatccctcrtttatgaagcttagtttcactggatacaaaattcttggctggtaactgttttgcttaaggaggctaaaaatagaatcccagtcccttctagtttatatggtttctgctaagaaatctgctgttaatctgataggtttttctgtataggttacctgctgcttttgcctcacagctcttaagactctttcctttgtctggactttggataacctgacaactatgtgcctaggcaatgatcttttcacaatgaatttcccaggtgttctttgagctgcttttatttggatgtctagatctctagcaaggccaggaagttttcctccattattccctcagatatgttttccaaacttttagatttctcttcttcttcaggaacaccaattattcttggttttggacatttaacatagtctcaaacttcttggaggctttgttcattttttaaaattcttttttctttgtctttgacagattgggttaatttgaaagccttgtctttgagctttgaaattcttccttctgtttgtttgattctattgctgagactttctagtgcattttgcatttctgtgtgtccttgatttccagaagttgtgatggtttcttatttatgcagtctatttcactgaagaactttcctttcatatcctgtatcacgtttttgatttgtttaagttggactacacctttctctggtgcctccttgattagcttaatagtcggccttctgaattctttttttgtcaattcagagatttcatcttggtttggatccattgctcatgagctggtatgatttttcrgggtgttaataatcttgttttgtcatattaccagaattgtttttctggtttcttctcatttgggtagactatgtcagaggaaagatctgggcttcaagcgctgctgtttagattcatttgtcccacggggtgctcccttgatgtggtgttctcccctttcgcctaggaatgggacttcctgagagccgaactatagtgattgttttgctagccacccagtggagctacagagctctgagctggtactggagagtgtctgcaatgagtcctgtgatgtgatccatcttcaggtctttcagctgtggttaccagcacctgctccggtggaagtgacaggggagtaaagtggactctgtgagggtccttggttgtttttgtttagtgcactggttttgtgttggttggcctccagccaggaggtggtgctttcaagagtgcatcagctgcggtcctatagggaggatgcaaaccttccccagggatacctggttagtattcaggtttctcaggtggtggacggggccatagagctcccaagagattatgacctttgtctttggctaccaggctaggtagagaaagaccactaggtgagggcagggctaggcgtgtcttagctcagcctctccttgggcagggctccctgtggctgctgtgggggatgggggtgtggttcccaggccaatggagttatgttcccagggggattttggctgcctctgctgagtcatacaggttgtcagggatgtgggggaaagcggggagtcacaggcctcacccatcgtccacacagcctgcagtcctaatggccggtctcactctcatcatgcccccacgacagcaccgagtctatttccaggcagccagtgaccagggctgagaacttgtcccagaccatgagccttcccattgagaaagcaagcagactcacagttttttggtgtctcaaggagtctgcagaggtgatctagttcgttacttgaaagggtctgtggattttctcagcttttctggtatgttcctacagtagttcttggagcaaaagttcatggtgtgagtctccacatgctgctctgtctgtctgagcaggagctgcaagctattcctgcctcctatccaccatcttaattgacagtggtaaccaaaatgtttagagccattttgacagattgaggaatcactgctatgattaaaatgtagcacttgagatgaccatgctcaactcgtaggatgccatcatcaaacagctttgccttctccctccatttattctttaaacctgcacagtgggacatgtccttccctggcaattcyggtcactcttaggcaattaaaaaacaaaacaaaacaaaacattcaggttaaaaacaccagataattcagtacctgaaacgtccagcattatgtactagcaaaaacactggagttgatttagaattgagctttcttccctcctccaacaggggcctgccccagccctgcagtcatggaaggagagtggtcagcttccctctttctcctcagtattccttcaccccttttcttctctaggctagcctcagtctcagaccccattaaattgggttgagagagaggaggaggaaggaaatataagggaaacagtaaagtgcttacttaactgctgatgaattgttagtctagtttcagtgctttctgaatctagcagatatgtaagtttacttctctgtggagttcttttgtgtattctttgcccaaaaagaacataccctccccccattgctaagggtctcatatctgtagttctctgagacaaaaacaatgcgttgctactgggctacacctttcccgacccttaggctcctggccacacctccagctaatttctgctatgccttttgagtagtacctgaacagtcctgatatggctgtctcagatgcacagcccacaccttgttcatggaagacactcaaataccctttgcttctgcaaactctgggagtgcaaccacctctcctagatccaccaacaaaacagccagcaagcctagatgctatcatgtctgatgtcagatgtggttcagacacaaatctatttgttccccaaactgcacagactgctgaggacagatgtgaagccctctgtctgcctttttaaagtccctctttcttgacatgaggtgaagcggcaagccccactaaccactggctctccttgattgaagggttgtggactctcaacacatcaatagcttccttgaacaatccctccaaaactgtccaattcttgatccttttaaggaattatgagttttataaacagtttatagcaccttttttggtaaattttgcaaaacgtctagctcttttaaaaaaattatttcttgatgcttgaaagaaaatattcactgaaacatcatgttatgtgagcatcatttttctacccccatttagaaaaaagcatttctgactagttgcagaaggaattttgttacatggatatagaattggctgcatctagggatagattgaatggatgacaaagtgaaaccacgctttctttatgaaggttgtattttcaccttccttgtagacacccttccttttccagggtgcccttagataaacagctgtgcatcttacaggaattgcttacaatgatagatttcccctaagctcatgactgccaaatttgtctttgtagcccagacctctttctgagatgcagatccatatatctgatagcttactctacttctctgatcaaagtattacaagtttagctcacatcatcattactctaaataccattcctcattctgaatatctatttgccttcatgtaatttatctttagtcttaagaaatggtacttagaaacccttagttgtttaaatcagaaagttgggagtcatcaacagattcttaagttcttgtcaaccatgccactttagcaatctggtgatgtctctgaccgcctttcaaaacagtgtttgtaagaatacaggactactatggaaaccaatgatatggaaacacagttctgttatgaatgacttggaattcatgaattgttttccttctcatctctcacattgattcagtatatcattcacagatcatctcctgaatagcagtcagactcattttattttctctatcttcactgatgctttcttacttcactccttcatcatctctcactgaatgactgaagtttcatttaaaaaacaacttatactgataaatttcaaatatagacaaaggacacaaaataatataatgtaccccatgttgctgttacctagttttacattcccactccccactctattataatgacgaatttatagactttattttaagtaaaacttataaactgtcttagtctgttttgtgcagctgtaacagaataccacagactgggtaattcttttgtcaaacgtctgttcaagtttttatttttgactatttttaattgtttaaaaatgtttattagtagttgcaggagttaaaaaaatctggatacaaatcgattatcagattcatggttggtaaatatgtttttccaatctgaagcatacttattaattttcttaatgtaatttttataagcaaaaacttttaatttttaaaaatgatattatgttctatgtccttctgagaaatctttacttatctgcaagtcatgaagatcttcttctgttttcttctaaaaattttatgtgttagctttcacacttaggtctatgtatgattcatcttgaattaatttttatgcttgctataagatagaggttgaggttcattctttttttttccatatgaacatctagctgttccagcataatttgttgaaattattgcttgctttattgaatttctttggtggctttttcaaaaatcaattgactatagacttgtactatttctggactctctattctgttctgttaatctatttttctatctttatgccaataacaccctgtaggtttaaagtaaatttcaagtcatgtggtatgaattctctatcttttttctgttttcaagattaatgtattctggatcctttacatttccaaataaattttagaattaacatgtcaatttttattttcagaagacctgctggagttatgattgggatttcattgacttagaagattaacctgtatgtatagtttattttttagccagtgatttgggagagagatttatttgcagattttagggatcactgcctttgtgacttctctctatttaacatattccccctaactttctgcagttttgccttcccctaagttatctgatactttgatcaagtaaggaaactgaggctttctgcaaccccagctatgtgcaaattgggagtgctaacagtcaaatatttgcaaacttgcaaatttcattcattgcagtttgtcttttaatgggggtctctgctccagattttgcctaaccatgttcactttgtagtgcctttgagtagtttttttttttaattgtccagatctaaaaattgttatctgtggaacaattgttctgacctagctactttgctattaacagaagacagagcacctccttcttgcctcctctttcatctccctgtaacacacctgcccattgtcccctaagtaatctttcaaaaaagcaaacccaagcaaaccattttctggttgaaagcccatcaatgactcttcattgctttctctctgctttcttatcttccttttttagattcctcctcacttatcctatgcactctctggctttattgaaccatttggcatttcctagacacacccttcccttaaaagtctccccttcttgggcttatatcatgatcctgactaaaatgcctctatgttctttgtagccgggctaactcctagttcttcaaaagtcagctcgaagtaccaactcattggtgaaaacttctgggcgttattgaaagtgggctactcatactttcatattttcctaatgtttttgttatgttttagtatcacaaaactcatcaacttatatttaattgtttaatcacttattacactgtgagctgtgtacgccttggtagggtccatgtcttacctgtgattgccaatcgcctagtattcttgttgaggaaataagggaaggtgaacggactgaatagccacatgatggttgcattttaggtgtatttatgacraaattttaggtatctggtcattcccaaatattttccctttgtcttctcactcatggcactgaatatttaaataccaatatgcgattaacaaggtaaagttagaaccacagaaatgcctcagttatccagaggaaagctttccaggagcctcagaaaatgaaccagatgaagacttaaaaatctatgtatataaatagaagaattctttaaagagaataaaagacattgatgagtcgaaagcagtgacatagtaaataactaaagagccaatgatgccaatatttcatctgttgagatatgacttaaagttttatgaacacaaaggaaaaggctgattctgatttcaaaaattaagcagctcttgaagctttaattggcgtggctacagtatgacacagaggaacactgagggagctagaccatagccgtcgctgctgtgagacacagggagccagaatcctttcacattttcctggacatgtcaacctttctttgtttcttttttgactgctacataatcatataggcattgcatactttttatggagattctttcttggtggaatcccagttttaattactgtttccatgtaagttattgttggtgagcagacaatgccttttccactttttaaaataatgccatagaattccatattactaccatgcatatatactaaagtttctcccgcctcatcctttttttaacagattggtgggggtctcactctgtcgcctgggctgaagctcagtggcatgatcataattcactgcagcctcaaactcctgggcttaagcaatcatctgctctagcctcctggttagctaggactacaggcatgtgccaccatgcccagctaattaaaaaaaatttttttttttggtagaaacagggtcttgctgtgtttcccaggctggtcttgaactcttggcctcaagcatttcttttgcctcagcctcccaaactgctgggattataggcatcagctatcctgcctggtctttttaaaaggccttttcttacaattgattattatctcattactcctccttttctcatgtatttttcgtctcttctccagtccatttttgctttgagcctctcccacatacacctgccccctcaaatatctgtcatttatcacaaaggctttctcatactgtcatgctttaagacactgataatccacttcttccattaagttgccctgtaccaatcatagatgatcgattgcgtggttatatgaaatagataatacaaaatgaaaaatgaacgtttcttctttaagtacaccttcctcagtatacacctcttcccctaccctcagaggtaaccacacttaaccattttctgtgttgtgtaatccttctatattttttctaagcatctatgaataaacacacacacgtaaagtaagatgatggtcaaaatgtttaaccactgcatggtaatataaaacttagcacttaaaaatatgttctattctctaggcagaccaaactatatataattgcctaccaggtgatctatgttagaggttaaatcattcatcaaactattccaataattttcaaagcatttattgatttttaatgggtataatcttttgtttgatgcagctgtcggtagttaagtgatgtccctgtatcaaccatgatttgaaacagggaaacacatcaatctattccaatgattcactcattgcataatactgccacttgcttctttcatttaagaatatacttttagctgggcgtggtggctcacgcctgtaatcttagcactttgggaggccaaggcaggtggatcacctaaggtcaggagtttgagaccagcctgaccaacatggagaaaccccatccctactaaaaatacaaaattagctaagcatggtggcacatgcttataatcccagctactcgggaggctgaagcaggagaatcgcttgaacccaggaggcggaggttgcagtgagccgagatcacaccattgcactccagcctgggcaaaaagggcgaaaaactctgccaaaaaaagaaaaaaaaaagaatatacttttgacatctttccctgtgagactataataaatctactttattgtatctaatgataggatagtatcccataatatggatataagtttatctatcgagttccctactgtttaaatgtttccagtgttttgctattacacgtaatgttgctaaaacattctcttacatctttgtctgcttcggtgcatacttttgtaagatagacttatagacgaggaattgttggttcaaagtagatgtgccaatcaagaatttgcccacttataagtaactacacacatcttgtgtgcacatgcaccgacatacatattatcacctgaaaatataaacccagatgcaaacacaggtgagcactaaattaattctaaaattcatttgaggatttggcaccatgaagttgcatagccacataccctcaggtagacaagacaggggaatggcagaggtaccttggtagaaagtgaaggagaagaagaaaggttggtggtccagagaagtcagtatttccttgcctggaatgagtgcctgcctatcgaattttgataaaacttcttgattgtcatccttgtttcattacggtcctcccaggaatattttgcttttttctaagctttaaagatcatagcttcgtgacttaatctttggactggatttccccacttatatgagaagaactaataatgccacatggagcacaccttttcaggactcaaggagtctaaaaaaaagaaaagaaaaatgagtcagaacttctgcctgtgagtctgagtcagcttagtgtgttaaaaaaaataataataaaaaaagaaaagaaaaaaaaaaccgtgtgaggagacctgcctggaaaaactgctgaatggaaagacttgagaacagcttatagatattgacggcagatgaagaattttcatgtcttttcagaaatggttagcagccactcataacagtcctgtgacgtcacagaaatcttgactcctgcttgtctttctcgttctcctttaagcccttccctcctccttttcatataggaccttaacacaagagggtcaggaagagaagagaagggttgctcacaggaggaaagaaggcaaggggtagctgttactttacctggtgggccatgtgtcgctacaaatcaggtggtctctttggaggagatgccacttggtaagggaggcttcctgagcactcgaatactactagcaactcagaatgtgggaccgctggaaggaaaaacacccctggatggggcgaaggttgagttcaattttattttttactctgtgtgtgtgtagggggagggtaatgggaaatgtgtgttttgcagacacattaacataaggagaatagcggatgcgactttattatcctcattcacgtaaaggtggacatttaaatttttttttacagtagggaaaaagaaccttctgagttgatttggtatagtggaaattgcatggaaatgtttagcttcctctgttttcacaaacatgtaaccttctaagaaaatctctctttgacctatttcaaagtttgatttttttttttaaaacagtttggaaaataggagctaacatgaattgccccttttccaacagtgaaaatgtttgtaatgtaccttttcatgttgctctaattatgaccataacttcttttttattcaatcctgaatctgttatattttaaaattatataaaattataaaacactggccaaaattagtcacccaggaaatagtataagggacccagttaagaaagtaagtgtaagtgactgaaaaagtttggtgccttctcattgaggcagacttgcttatttgtttgttaacctcagaagtattaccatacatactgtctatggatttagatacatgatttttctcaccttctagacatccaccttgttgtgatagaaggagcatggatttagagtcaggcagccttggatctgaatcactttactacttctgtggcccttagcaggctatatagcttctgtgagcctcagtttcctcatccataaaatgaaaataatgtctacaggttagtattgtaacaagggatcactcagattaactttggaaaagctttctgctattaagcatttggaaaacatgagtttctattttttttttgtattttggttatcattattggcttggttttctttctaggccttggattctccttcactttatgtagaatatgatcttcttgtagtagatagatgtgagtcctgccaacagaatttttctgaattggcttcttgtcttttctttaccaatagctgcctattcagttcagctgcctgatcaacatcttgtctctcaattcctgtgtgccctcacagatctattaaagcatcctgagaagagggtccctcagagtcaccaggtttcagggctccagcttttcctggggatcagaataccccttcagaggccaacactctaaggcagtaatgtgtttctctggccaaacgcctgatagtatcttcttggcaagttcattatttattcccctttactggtgtgagggttttcccaaagtgtcatgtctttrcagagtttttcctacccttccgtgctatacgtgtggtaccattttatgcatttgtttttgctaatatgaaataaatcccattataaataattccaagggattttgcagatgattgtactgttcagaataagaggagtgttccgtgaatcatggagctgctttggtacacagtttgtagaagtaaaatgtggtataatgtaattgacccatgggtcccttcttgtacagagtgtcacttgctgagaagtaagcaaaaaagggagtgcattcctgcatctggcaattcacccccatcctgcaagagtaactcatagagcagcagcttattccattgtgacactgactcacccttcctctctccacccccattgtctagtgctgatgtgttctgtccccactaattctagggtcacactgacttatgccttcatcatcctaagtggagaagaaagcttgtctgtgttgatgaaagtatgaaaatagaaatgccataacttttaatgcaaacaatatatgtttgttgaatgtatgaatacaacaacttggaataactgctgacagtgtttccaaatattttgggtctatttaagtaaagagacatgaataatttgaaactggcattctttttcttcttctttttttttgaattagcaatacatgtgatgaaaccttaaaaacaaattctcatagttacgaatggttgcctttagtgagcaggatggggaacagatctgggggcttaggtcattcattataaaccattctgcaagctttcttttttctaaccagatgtgtgtattactttaatgtttttttgatacctcccttaagtaggcccagtccagtttaagtgcaatctcttgagtgccttgtgtcagacactgtgccggtcacccagggctccagggtgaatcasgaatagctctcacatgtgaattcacagtctagttggggagacagaacagaccaaaagcagataatatttaaataacatgatgctggctaagagagaggtagccatggagttaagtatcttcctctccattttattcagccttttgttttaaaattctacctttatgatgtatttcaacagagttctgtgtcatgattttggatttagtggaaaaagaacagaggagattttcttgttaccttaattttcccaacatggaagatttgggaatgaagaaggacactgcaaagagtgaggcctaaaatggaaaccagtcatgatttttattttgctactttctttacggacacgaatgcacacagtgtagagcagcyttaactctgaattggaacaaggtcgtgtaagtgccaggacgttatttccagaagcccacagctgctgattcctacacccagtgatttccactgccttttcatgattctggaattcccaagaacagtgtcatcttattagaaggtatttcccagttcgagttggagacaaaccaaccttccctcacaggctgagtccttctggtttcactgccaaagcttccagactcacccagggtctgttagacatatttgaatgaatctgtcagattgttcagtcgttaatgaggtcacactttccatgaagaccatagtggcgtcattttgtgtaccaacaattgtatcaagtcatgatgattttttaaatatcattgaaataatcattaaaatattattgagataaagatgcatgtttattggtatctatttattcctttctcttgtttaagagagaatttacttagatgtgtacaaaactgctttctggcatacttaattttatgggtttctgatttccacatcactgaaagtatctggaatacctatgatgcaatgtgaatcttgtttccactaactagtaagtaaatgctttgttcgagatttaagaaagttggcctggcacggtggctcacacctgtagtcccagcactttgggaggctgaagcgggtggatcacctgaggtccggagtttgagaccagcctggccaacatggcgaaaccccatctctactaaaaatacaaaaaktagctgggcatggtggcacgcacctgtgatcctagctactcaggaggctgaggcaggagaatcgcttgaacccgggaggtggaggttgcagtgaactgagattgcaccactgcactccagcttaagtgacagaggtgagatgccatctcaaaaaaaataaataaaaataaataaagaatgaatataattgcaaagataaaacgtaaacccagattgggaataagaagcagaattataccaaaatggaagctgacgattacacagattcactccttatttactcattcaaagcttgcctcacataccataggtaaagtgggtaactctttctgatttttttggttcacttcaagactatatgatcttgaaattttaaataaataagctaaaaaggccctaaaatattttawwaaaacccactgagggccgggcgcggtggctcacgcctgtaatcccagcactttgggaggccgaggcgggcggatcacgaggtcaggagatcgagaccatcccggctaaaacggtgaaaccccgtctctactaaaaatacaaaaaattagccgggcgtagtggcgggcgcctgtagtcccagctacttgggaggctgaggcaggagaatggcgtgaacccgggaggcggagcttgcagtgagccgagatcccgccactgcactccagcctgggcgacagagcgagactccgtctcaaaaaaaaaaaaaaaaacccactgagtataatttattgatttttataaaactaattctttttttttctgttttacttataagttttgggatatgtgtgtagaatgcgtaggtttgttacataggtatacatgtgccatggtggtttgctgcacctatcaacccgtcatctaggttttaagcccctcatgcattaggtatttgtcctaatgctctccctcccctgcctcccacccccagacaggccctgatgtgtgttgttcccctccctgtgtccatgtgttctcattgtttcactcccgcttatgagagagaacatgcagtgtttggttttctgttcctgtgttagtttgctgagaatgatggcttccagcttcatccatgtccctgcaaaggacatttcatttttatggctgcatagtattccatggtgtatatgtgccacattttctttatccagtctatcactgatgggcatttgggtaggttctaagtctttgctattgtaaatagtgctgcggtaaacatacatacgcatgtgtctttatagaacaatgatttataatcctttgggtatatacccagtaatgggattgctgggtccaatggtatttctggttctagatccttgaggaatcgccacactggcttccacaatggttgaactaatttatactcccaccaacagtgtaaaagcgttcccatttctccacagccttgccagcatctattgtttcctgactttttaacaattgccgttctgactggcatgtgatagtatctcattgtggttttgatttgcatttctctagtgatcagtgatgatgagctatttttcatgtttgttggccgcataaatgtcttcttttgagaagtgtctrttcatatcctttgcccactttttgatggggttgtttttttttcttgtaaatttgtttaagttccttgtagattctgcatattagacctttgtcaaatgagtagattgcaaaaattttctcccattcataggttgcctgttcactctgatggtagtttcttttgctgtgcagaagctgtttagtttaattggatctcatttgtcaattttggcttttgttgcaattgcttttggtgataaaactaattcttaattgttatcactcagtgaatggtactagtttgatcttcccttgctgattaatccagttctttccagttcacttgaaacccatttctttgactcagatagctttcactttagttccaaattttcagggacatttggtaccaaactcttcttacagaactttaccctcgaccaccrttgctggatctgccacagtcagagttcatctaccgggtctaacacgtctcggcttcttttgcmttttctcccgtgtctcccttgggtgtcgcagaagcagcaagagattattatcatgtagtagggctccgtaatcagaatgcgaaatccctatgcataaatgctgtcttttctcagaatttcctgacccactttctattttttgagaagacaaaattgacttttttttctgacttcttcagaaatctcttatagtgactggtattttcatctgctggcacctctgacaatgactattacaacgtgcctcagaatacagagtgctaacacctcatcttctaaaagaaatgcttcctctgtaaaagtgttttctctgatgaagccgccatatagaccattgaataggaactgcagaagactccggaacacaatttgatagccgttcagccaagcggctgcaatttattttgtccctgagtgtgaaggaggcagcccaaagaatgttggctctggaggaggaaggcaaggatatggggaaacaggggccagagaagggcaggatggggcaaagattcagggcaccttatgtaatgaggcacagcgtgattctgcccggggcctgtacgtgcatgcagtcgggttgcctccctttcccctggaaatgtgccctttgcttactttttgtttggttttaaagcagctggaaaggatattttttgctcagaattggtgcttagcttttgcagaagctgcttcttgagagtcgtctcttgtcatccctctgggttttagctcagtgtgacgaagctatttaaaatatgtgtgtttttaaatgattctaaaaatraagtattcacattgttatgcctcactccctccccactattgagtcctgctcccctgacagcaactttccatttctctagcttatccttctggtatttatttatatctgtgtttctaaatactatgtttatactatgatcatttggtttgccaattgtagacattatctgttaggttggtgcaaaagtaattttggttttgccaagatgatagtattaggtaccgacctaataccatcatctttctatgagatggtaccattttagatgaacatcttgtgtccacttaacatcctcccactttctgtagcttcctcatatatgtagatcaaagttcttggttagactcatgatcagattatttgttttttgtttgtttgtgtttgttttgtagggacagggtcttgctgtgttgcccagtctggtcttggagtcctggcttcaggtgatccttctgcctctcatactggaatattatataatatttttaaaaatagctcacctttattatgtattttctgggtgcaagacactgtcgaagagctttagacatgtattaactaatctttatagcaaccatgtaaagcagatactgttattctttccattttgcagatacggacattgagacctgggttaactaactttccaaagtcatgtaggtagtagctggtggagccagacttcaaaccaaagtaaacgaggctccagagtctacttttaaccactacactttttaaatgattaagattttacaaatactatttatagtggagccacatgtatattattatctcttctccttctcttctcttctcttctccttctccttctcttctcttctcttctcttcctcttcctcctactctactcttctcttctcttctcttctcttctcttctcttctcttctcttctcttttggaactcttattagatggaagttgtatgtcctgaatttatcctctaattttcttacctttatctcttcattacctttgacctacattctgggagattgctttaactttatcttgtaactcttaccaaagagttttttttcccctgtgacactttaaaagcccagtagctgtttcttatttttgttctgttcttttatttttcagttctttcttcctaattgagtactttggccctgtctttcatactggtggctttcctgcaatggcaggagatctgcagccatcaggtcacatacatgaacaaggctctgaagagctgacaggataacttccgtgggtggcccaggctcatctggtagtggcccccccatcaggtcacagacatgaataaggctctgaagagctgacaggacaccttctgtgggtggccccggctcgtctggtagtggccccccactgcagagtggcctaggatcacagatctgttcacttggaggatcctcagatgtcagcatctggaagcttttcccttgggctggccagaatctccataatagaaccacccagacttgttcctggggctgtgcacctgctgcaggtgttgtgggagccaagtttggagtgggaaacagaaagatctcattgtgggtgttgactttcactcaattctctcttttcagactcacgtttacccatgcaccaccctcaccaccctgcaagccctccctatttgagtccctagttcctgaggatccctctttcagtttctctagaaaaagaaattcctcctgtcctgccctgggtgtgctgagtgggaaggagggaataaggaagattctctttgccctggaggaagtccatgacacttccaattcctcctccaattcctcagcttttctgaggggctccgtgcaaattggcttgctttttcttggttttgctctttgagatttgtaactttctttgtgctaataggttagtaataacttgtcaattcactttccatcttccagaagactgttaacatttatttctacctctccatttctctgtgtccttgtggaactttactttttaaaaaaacttaattactttcattatgttggaggttgggaagggagtagagatgaacatcacgttgacacaaccatatttgatggaagtccgattagatcaccattggaaatatttgtttcttagagtttgcttcattttcctgttaggctggaggatcccatgatatttgtctcagaataacgggagggttcacttttcattctgtttgagctttcctggtgtatacctttcttcctttcctcttaggatcgtaagtcctgaacaatcttgttctagctcttttctcctcttatcttcatctgtaaatgaaaggggctgagagctggtttcaggcaggaactagatctgacatttaggaaatctcctgttcaggtagcttctcttggccttttcctttcagtgatattttctgaaaacctgacttgccatactgatttaaatgcctgataccagtgtaaggtatagatgtgacttctcctaggaacatagataaagctttgggggtgaaattgacaatagagtgtgtctcctttctctctttagccagtgggaaggttgggtgacttggggctgcaggattcygggaggcctccgtatcgtatgctgcctgtccttagagtccatccagacctgagggctacttagctgaattgtttagtaaacgacgtgggattcagctgcatcatctctatgaagactctcatgttgacttatcattacaaagggctgatggtggcagtggttctaaaccttgacaagtgaacggtttctgcaggaaggctctttggaagactgtgacatcacagacaagacaaggaatatcattagtgaggtcattttaaaattctcagatcttggacttgctctgggcagtgactttgccagcaagttggaagagggcacaagaagtgtgctcatcaaatttgtggcagacacaaaactggaaaggatggccaatgtaatcgatgacaaaaacaaaaatatgtctcaaaatgatatagatatgctggaatgctgggttaaaaataacacaatgacatttcaaagggataaatgtaaaatcttattttggaataaaaaaatcaacgatacataatggtgggagaaaaaaatctactggcagtagttctggtagagaaagacactgaagttttatttgactaaaagctcagtataagccactaaatctgactgaggcaactaaaaagctgcattaatggaacgttaatgtattgaactcaggaagtaacacccctcttcaatggttggactgcacctggcgcctcatgtttgcccagagaagggcaattagcaggtgcctgagggtctggaagcatgtctcaggagaaaccatggaaggaactgagtatattcagatggaaaagaaaactgtcttctccttattagctgtgaaactttaggcaagttaccctggaagcccctgtagcctcttgggtaaaatgtggaaggagaccatttctctgtggtataggtagggggcagaaagaaggaagtactggaggaagagattggagaggtaggaggtggggatgggattgagaacatattcatagctcagggtaaggcattcacagtttatcctgagctgcaggaaaataatatgggcactgtattatctttcaaaccaggacattcagagtgaaagccaggcttattcaataaaacaggacaaaaggtaccaactagggctgttgcaggtaccctagacaaaccaggaggaaaggccatactgccgaagagcactgtcagtagaggacatctgccttttggggtggtgagtggtctgcctttggaggcatctaagcagggcttgaatgaacttctcttgtggaccagcacaagagaagtcgggtggaaatgaacgaaatgaactttcagatccttattgagtactgctacaagggatgctatgttagagaatatatgaaacaaattaaacaggagccatcctggctctctgcaaattcttttagatgtgtatatttggcaaaaagagggcagaaaaaggaactctgaccctttctcaatgtaaaagttccttctgaaggatgaaattaacttaaaggttcagaatctgttcacctggaacaataattctggtgtgctcaggaagctttttaaaaacacagcttcccagggtgccaccctggacaaagagtcagaggaggggaggggcactttaaggaatatgatctgtcctagggcaacaccgttcacatctagggtgagcatccacctactgcatatttagtaaatattcgtgggctctgggcctagatctgtgatagygtctgatcaaagtccaygtgggagccatcacttgacactkttaggggcttaaaataaatgttgtgacaatatgcaaacactgaacaaatgccaaagcaggtagacgacctgtcccttatttagcggtctgtttttcaggcctagactaccctatccttactggttagaagtattacagcatgctttgctaattattacaagagactgaaaattgctctatgtggaggttgagaccttattggagacttggagcagacaggcatggcctgaaattctctctggatgaggaaggtgtaaggaaacactggcctgagctacatgagtcaaaactttttagcccagatgaattacattctagatacagagagaagctatagaattactgtttagaatctttggagaatcgtggataataaatgggacaggagctggaaagctgagataggcaaacattttctaagttttcaaaaatgaggatactttggatttcacacactgtagatgagagaatctgacataatttccataaaacattcttgaacaggttatgaaacaagcagtttgggagtcgttggacaggagatgagtgatccctaaatgcaaacactggcccactgagaatgttaagccaaagcagcatgatttctttttaggaaaattaaagttgcaaagccttaaatagagcaaatacagcagatgtggcatatctaggatcctgcgagacatttgaggtgtgtgtcagttcacacccgtagcttcctggacaaggctggtgcatataaactgtataataggacagtcagatagtcagatagcatcattcttgtttgaatggcctctccagtatttcacaggcaggcagacatttgacggtagtcattctgttgcctataaaaatataaaagtgtccagtcctttgcagtccttaccataccacttgagtgaatgagtacctaaccagagagaattctcatgtggactctgtaccttggcccctgatttgaaacttttcatcagcaatttagatgagaataaagagaacatggaaatcaaaatgctaagtgatatgaaattgggagggaaaatgaatactttggatgaggccataaggttttgaacagatatgaatagctggacaatggagctaaagcctactggaatcattctttgtcactcagtccacaatattaaattccctatttgtctggaacaggctaggtgctgagatcaggagatgtgcacgccatagcaaggagagcaggaggcagacgtatcctgtaatactttggtggaggtcagccccggatgctataggagcacacaatgaaccagatctcatgaaagcttgaggtgggtaagggcttggggagagctattgaaccgagcaaggagatcagatatctggagaaggtgatayttgaatggttttgaaaaaaaggagttagctgtgatccatgctggggtgagggtgttccacattcaggcagcaactataatgatgtcataaccaggacctgggtgtgagacaacatggaaaaccaatttgcaatgctcatcaatggcagagaactggaagagagagaggtgttacatatttttctcactttagcgttccctgctgctggagtatagaatgtgagaaagactctagggatactctaaaaaggagcagttgtaacataaagggcatgctcttttatcttagaggccagcattttccaaacttacctgatcattagaatcacttggtccttgttacaaatgttctcaggccactttcttggcaaatctgatttcaggtgtgtcagagtgtttcccaggaatctattaagaagatcgctagttaagtttgggatatactgttatagacatggggaactattggagatttaatatcgggaatgaactggtcacattggcattaaagtgggctgttctggctaccgtatacggaatgatttgagaggggtaaatacatttgacactctaggccagaaataatgagaaataattaagaaaatcagtaatagtagacarctgttggcttgagagagactgaagtggaaccaagtgggtttaattactacctggacttagaaaatgagggatgaggacgaggtgattgacggcaccagttttcaggcttgggcttttaggtggtgccatttattgggatagaatcttgcttcggtcaagttgagtttaggctgcctgtgagacattgaggtggagatatacagtaggcagatgtatgggtctggagtctaggagagaagtctggaggaacatagagatttgtgggcccaccatctactgtggtagttaaagccttgggtataactcagattgcttagtgagaatgtttagttgagaggaacagatggtccagaacaggaatctgtggaccattctatgaaagaaagctaatgaggctttcaaatgggagcccaagggggaaaatacagggaaagaagaagaaagaggagaacatggtgaagagtatcaagaggaagagatcgctgagtgctgctgagggattcaggtaagaaartagtcattaatgatttctgtgtactttctttgagtgagcactgctgtggttgttttacaaatgttgtcttatttaatcaccacaataaccaggtgaggtagcccctgctatttacgtcaaggaaacatggggaaactgaggcagcagaaagggtaaataacttgaccaaaggcacaaagttgataaatgccagggccaagatttgaacataaatgaaaggatgccgaagtcctgtgtgttgaccaccacaatcacttgttaggaaacacagtggcaaaaaggctacaaagggcttgcagaatttaacaacagggaagttcttcataaccttggctctggcatggtcctgaagcaaaccaccgtgcagtggcttgaaggcaaaacaaagaaacagacagaaaggggagatgactttccaaaaaggtgagttgctggttatcaaagggtaatacgggccaactagggatgtygttttaagatgggaaattgtgtttcgatgctgagaggaaagagtaggtagagagaaattggtttaagattcaagagaggaaattttggttgaattaagatctctaaggaggcatgggagaacagagtgcagaacagcctaaagggaattgcctggactagagatggaaatgtcgtccctctggactggaaggaaggagggatatgacataaggatgcaagaggaggggaaggattacctctttgaagcaggatgtaaggtcttattctgaggggtggcttgttgggtgaagtggtattagtggacctcagcagacccatctaataactttagccatcagcttctttttgccaaccgaaatggttcctattggacttcccccttctggctctcctctctccctttctcctccatttctggagcctgtgtagaaccttcattttcaatcactgcttgttgctgtcatgagtggtgcttttccattcgggaacagaaaagaaaccctcccgataaaatccagtagactagagtggggtagggggaaggaacagtgattgctgttctttccttttatccctcagggaaagaaggggacgaagatggggcgggagggaagtagtgaaggccacagaggtaggaagaaccaggaggtgggctggagcagagccagcttgtttagcaagcaaagcagataaagattagagtaaccatgacaacaggctactggcaaaggcgctcagcatttggggaggagagagggaggtggaatggcttggctgggtataagcccagagttttggaaaatgccgtttcttcccgcagggctcttggytgttagagaaatcaccatagtcaccaacagtgagtgcaagggaaagaaaggagagggcccgcaggaaagattagtaggtgaggtgggctctgctgattcaaagaaagagggagtgactcctctgtgactggaggcacagaagaggattaggaggattccctgtcgattgcctcaattgcctcagtctatctgtgtgtctcagggtacatatatttttctgtttagctctattttctcactcacgctatggtagcaaaggcrccacaactagtatgcctttttgtttctagtttttcaggataccacattttttacttctggagaatgaggcatgagaatatcaagactctgtttttttttctgaggatgctcaaaatgtgtgtgagggagggagggacgaaaaggaggagagagaaacagagaaagaaagggagaatgagttcatcttggtgtaaactcttcacccagcctaggcctgtaattagttaagaatttcttggaratctttttcccttkttctattgccacccacttctatagctgcttgagaatctctatcaataagaatgtagaagggctgggcatggtggcttacgcctgtaatcctagcactttgggaggctgaggcgggcagatcacctgaggtcaggagttcgagacgagcctggccaacatggtgaaaccccgtctctactaaaaatacaaaaattagccaggcgtggtggcaggcgcctgtaatcccagctactcgggaggctgaggcaagagaatcgtttgaacctgggaggcggaggttgcagtgagctgagatcgcgccatcgcactccagcctgggggacaagagtgagacttcatctcaaaaaaataaagaaaaaaaaaaaagaatgtagagcagccatagaaaataatgaaattatgtcatttgcagcaaaatggatggagctggaggccattgtctcagtgaactaagataactaagtgaactaagaaatagaaaatcaaatattgtgtgttgtcacttataagtaggcgctaaacagtggatacacatggacataaacatgaaagtaatagacactgagagctccaaaagctgagggagtaggagagggagggggttgaaaaattacctgttgggtacaatgttcactgtttgggtaatgagtatacttgaagcccaatccccaccagtatgccatgtacccatgtaacaagcatgcgcatgtatcccctgcatctaaaataaaatttaaaaaatttaagaagaatatacatacttttaacatctgtgaatatagttgttcctttgtgagtaagcccaaagcgcctatatgggaaaagtaaaaaaatggtatgattacaaacaaatggtgctttaggtttgagtatctatctcctgataacacccagtgtaatcttgcccaaaaaagcaccagcactgttggggaaggacatatcacactcttccttagtctgatacgtcagactgagatatatatatatataattttatttatttattattatttttgagacggagtcttgctctgtcacttagattgagtgcagtggtgcaaccttggctcactgcaacctctgcttcccaggttcaagtggttctcctacctcagcctcccgagtagctgggattacaggcactcaccatcatgcccggctaatttttatatttttagtagagatggggtttcatcgtgttggccaggttagtctcaaactcctgacctcaagtgatccatccaccttggcttcccaaaatgctgggattacaggtgtaagccaccgcacatggcctctgagatatgtttttaatataaagtgtatcacaagcatggctttgagaggagagtccactcccttccttttctaccagactactacttcgttgcctacagaaatggatgctggagctaccacttgggccaggacctgagtcccagaatgagcccatagctcacccaggggctcatagaaccccactggttccataagtgtgggtgtttcagatatcattgctgagacttctccgttttgattgaggaggaggtagtaaagtggattcatttccatttccaaatctctttccttccaaataagcatgtatagcccaagatattggaaaaagaaggttcttttgcacaaaggaaacttaaaccaggagatacaggacttgagcttkgttctaaactgtcataaatagctgtgaaaagagaaaacattaagaagactgatttccccagggtgcagaggrgaacaagctctctcaaagttggaaagagtgttacgattctccaatttcgctatatgtcttaaactactttttagagaaatatctacttctgccaggtggatatagttatcttgttcttctcagctacgttctaattcatgaacacatagatttggccagcagtgatgtcaagtgcccagtgccttggggaacyggcttggcattgagattttattggttaagagagagatttcctgaaccaatattgagctgtttgccaggttctggcttgagtaatttttttttctaataggaagtagaggtggagggacaggtgttgagggtcagataatgggtacggttttagacattttgaatatgagccattcccttccagcgggtcaggagaatggtctctgacagggagagaatgttgggactccttaccgtatgggactagctggggcatgaaagtggatgacttctagggaaatcacatggagaggaagaggggctgaacacagaatcccagctgacaccaacggttaagaaatgggaagatgagaagcctgggaaggagagggtgtaggaaaactgggaatgaatcatacacaaaagttagattaagaaagagtggtaaagagaaggaagtggttaccagtgtctgtggctgaagagcaggactgagaaatactaaggggttctgtctccatggggatggtattgctgactctggggagagatttttcctgaagtggggtgggggaagcccgatgacccaggtttaagaagtggatgcagcgttaagtggagcagaacatagtgttggtacccagggcaccagtggtgctttgaaaagtcaggggcggctttcatgcctttattttggagaggattaaaaaaaaaatcctggagaatgtttactgagaaattccagagaagaaacaaatacaaaaaggaaatattaaaaaatataaccaaacagttatataccccaaacacatccaaaatatatggaacccacatggttgagagaagaaggcagataaatatatctggatgagaaattgaaaattaaattgtgggtaggtattagtggtccttgtgtggttaggagagggctttggaatggaagggcaagggaaatgtgttgggcagttagtcttaggaacccagtactaatcaactcttaaatctacacaatgtagtctctgaggcaagttcattttaaaattggaactaattttttttttaaacccacaagtcaaaatacttagtcttttagatcgtagatatggatgaagttaaatagytctttaagaacagcactgcatggaaaataactaggtttactagctaagtttagcatataaagctctttactgaatggcttctttgtcaaccccaggctggaggagttcaattcctttttatttggtgaattccttaattggattttgtttgcygatcttactttctcacattgtaagattttaataaatcattataatcattccctcatgtcttacaaaaataacctttctgacggttcccgaatgactttttttcttctgtgtttgcatcatgggattattagtgtagcttacaaatgaatcagaaaagggctgtgcagctgagggtatatttccattattttctaggtgtgaacttggagcctgataacaaggaacctgtgaggtcacgcttggctgggagggcacagcaggtcttggcatattatctcctgtctggattattgatgagatccactgcttggaaacaggagagagatctcctatctgcttggttattaaagcctctgcaggaaacaggtttattggtgatgtatgtacactggggcttctgttgcattctcagctcagattcttctgtgtctgttactgttgatgactgcataaggaagaacttattttgttcaactgacgtgtttgttgaatgtctggctcaaaatatacctctcctaagaacttccatgactgaccttttgcaaggctgaaggacatgcttggttacccattaggaactggaccaggaacccaagtctttttctttcaattttcagagttttgcagtttgctctttggcttgtggatgccaacacttagagtttatatrgtcagtttctgcgatcctgagatgtatttttttttgcaattgcagttggttgtttctcctcctacagtttgtttagcctcttcctcatccattatcctccaggctgtatctgaagtgggcataggaggagtgcccttcccatgacctgcacaatgttcacagcccctttcctgttggtggggcttttggagaagttggggttcccttgggggattggcagttacaagatttttcagatgaggactgtggtttatttggcaattcaatgccctaagagacttaagagcattcaggtcgatttgtttccactttgttccacgtgtgagtgaccaaggcaaagrtctcaatctagacctagaagcaatttttaagcctgaaaagctcacttgtctcgattctctgtttctccctcctccctctgcccttaaactaaagtcaaccatcttgaggccatgtgaaaaaataggcttggatggaaaggtgcacccttaatctaatctttgccatggattggccccctcgtttggtggggaactcttcatgggacatgttgaaaaagacctcacatctttatcattttttaattcatgtttcttaccatattgaattggtttttgccacttgtaacaaaaggattcctgatgaatgcctcctgtgtttggagtcttattttattcttcctctctgtagctgcagggtctaatatatacctaatttataatctgtgtaggtgccaattacatatgtaattgtgtgagcatatgtatataaaaacttagaagcagatatgcccctgagagcaaaataaagaataaagttcctaaaacatacagagaaaaagataatgtaggagaaagaaagcagacgttttaaagtatgcgttgtttgagcttttatgcgtctgtcaaacaaccctgaaagttccatcacgtgtgatattttaaattttgctcccaaatggagaaaggcatcttcccacccctctkctgtgagtcaaaccactcaagcagggctgtggctgtcagtgtgaagccagctcttccaaggacccaggggaagctgccatcgctgccgtttctgcctctgcctttctttgctcaaaagttggcaaatgctggtcmtgtcgtggatctatttatagtaggcacacgtctacccaccttgttcttttcttagcatcaacttgacatgctatcaattatccatgaggtgaatgacaacacaagggaagttatttgaggcaggtgccctgaggtgagagatgagggggtggcagaggtcgcacagtgacagctccgaatgaaaagggtaaaacaaacgtcccttgctgcatctggctggtgaatgattgcagacaggttggtgggaaaccctgagctggtcacgcagcagtctcccactgcccttcttccctgtgcctgctgatgtttgaaaagcccatttgaaacagacaaggggcaggacctgaagatgtgatctccctccagtggaggtcatttttgttattctcttaagccacaggaggggaggacacaaggacctcctggggacagggggtggatgtggcagaggctgatactcttcctccacgtaggagcatttctggtgggagtgaagcagccaccgggggatgaaaacagggtgccccattcctcactgcctttgaaccagcagggaggctattcctggcagcagcagtgcacctgcccctggcccacagtgcctcccaccttctttacataaccccccatgacccctcttggattctagactaccctgtttttgctcctcctcactgacaacatagttcccagttaggggaactactacttcttcttctcctccccctccacgctcctcctcctcctcctcttttttaatgttgtaatagaaacattgattgcccatttcagtgggactggctaccctggtgtcctttttttatttatatgccattaatttggggctgctctgtaggagctggtggcatttactctcaaagctgctctaacgatgatgctgatgttattgttttagctccaggaattgaattgctcatggcaatagaggcgacttctgctttgtctgtagcctcatagatcacccctcctgtctatgtcctctgtccaccttggattttgaatgtgaagagagagagaaagattgaattatggtcaaagagagtggaaagcaaattaattaaacctctatcagccttgccttcagatataaactgactcagactttacaacccgttcctctctaagtttgctcaactcccctcctcctgctcccactctgttccgttcctttgggcaatgaggtactaaactacctctgtgataaatgtgtgtgttgattccttagggatagagcggctgtgccctgaaaggccttggaaccctcgcaaaattcctaaatacatgtggtgggcactccagcagttgctggcagactctcccagggatcccggctgagtttaatactgtctgccaggctaatccactttccggggcagtgtctagcaccagagactctctgtctggaagtatcctggccatttaaatgactccaggttcctggggatcagtttgcagcctttgttatcttttggcagagccaccttgcttttcctttctcatcttctctgtagtcagaccactcaagtgtaactttgtttattatttagggacctcatggggagaagttgagatgattatcctgagtacagaatagccaacttccaagtgggtattgtgggtgtgcgtgtgtgtgtgtgtgtgtgtatgtacattcgtatgtactagcatgcactagtaacacgtgtatgtttgtgagtgatactggctgtctaggaaggatgagtagggtttggatgaatctcttttgcaggaaccaaaacaggtgcaaaatacccgtgtcagagtcctcagatggctggtgagtggaggtgtagcaggacaagccgcagacaaaacccctcagacactgagttaaagaaggaagggctttattcggccgggagcttcggcaagactcacatctccaaaaaccaagctccccaagtgagcgattcctgttccttttaagggcttacaactctaagggggtccatgtgagagggtcgtgatcgattgagcaagcaggggttatgtgactgggggctgcaagcactggtaatcagaatggaacagaacaggacagggattttcacaatgcttttccatacaatgtctggaatctacagataacataacccgttaggtcaggggtcaatctgtaaccaggcccaaggtgcggcgctgggctatctgcctgtggatttcatttctgccttttagtttttacttcttctttctttggaggcagaaattgggcataagacaatatgaggggtggtctcctcccttagcggaattccrtacattttgttctaarttataaccaaaaaactgaagtttataaatatgaggccttccttttccctctttgtagactaaagtttgtgaaccaggaccccctatcgatacctttttagggattgtgagatctgactttttttttttgtattgttgattttgctatttctcagggatgrgagttcaccacccacacttttgtgctgttactatttgaccacctcttcctctttgctccccccacaacttttattatccagggagaaatcttttggaataggatagaagaggtttctggggataagttttggaaataggcaaatttttagtctgaaggacattgtagtaggatttatgattctgaaatgtagtgattgtatgtagttatgtatttgggtacacagccttatgtacattgcgttaaatacatttaaataattggataatgcctagacataattaataaagtgatgctgctttgtttcttttgttattatcatgttattattattttatatcatcttatgcttgctttttggttctgaggttgattgcaagggttagaaaatgacagcgtacaggtcaatttttgtaaataaagttttattggaatgcaggctggctcacttgtttatatattgtctatagttgcttttgtgttacaatagcacaggaaagtagttgtgacacagattacctggccaacaaagcttaaaatatttagtatttggcctttcgatacaggtttccaccctcaggtttaatttagtcttttcctttacatactttcaaaagtgctagaacaatgctttagaaagtgctagtgtctttaatggaagaatgagtcattatctatactcaagcatattctaaaccaatcagaagagcttgagagacacgtctgaaacgtgtgtaggaacacatatgataaaaatatatgaaaagatactcagcagatgtttgtcagatgccaccaagtacaaggtagcttttcaggtgctatgagaggtactcggtgaatggaataccatcttattctcagagagttaactgcccaataggaggaatctgctaacataacagagatgtctgatagtggctatagacaatatacatttttataaaactgaaaggaggtagaatggcttttgtagccaagtctatgtgtagaaaatttggaatggaaattaagaaactgtagtgatgactgctgcttctaacagtaaaggaaatmtttatgtgtatcttccagatgtttactgaagtagaaccttagtaagttatttgacatgaagcccaaagttataatagacacaaagatgcttcatttcaagccttagataggaacaaaaatatgattgaaaccaaaattagcctagaactagaagtggcctttacagatcatctactaatatcctgctcattttgcagctgaaaagackggggctgagagatctagttgtataaaattgtctctgaaacctaggacttctgacttccaggtctttactaaattccagtgtaatttttaaaattttcaagccagattctctgtggatgtggagaatatcaacatgaagtcttgcactgccttaaagatcttcattagcatgctattcctttcctttatcttcctgagtccccaaggtcacagatgtaggagtaaagtattgaaaagccattcaggactctgtcttctccccgttgccttgttgaactgcttatgggggtgatgttcaggggctgggctagggcattccactagagtgcccaatatctttatacagatgctgattgctgccctgaatacccacagcaggaatttttttgagagaggaaggtgagtgtgggcaattgggaaaacagcccacaggtaatggagggagggaaccttaagtttccttttaactgccaatcagtaattctttgttcatttattcaagtatttattaagcacctactatgtgccaggctttgttctaggcacttgtgatacaacagcgatctacacaggatcctccccttgagggctttgcattttggtgtgcttcatggtggaggagtgtgtttttcatggtgaagccatttggaatctgccaggttgargcactgaaccaggagtaggaagacctgcatctaggcctcagcacyaccymctcaccagctctatagccctgtgcatctcatttctctgcagccgagtcctttcttgttagaaccttcaccctggctcctctacgacaagggtatctttcttctttattctggtgcttgcctccttatctggtttccccacttcttcttgsccttagtttctgctgatatgttcttttgtccagttgcctcttactgggtctccctgatgccagttgtgtgtccctgtgcaggtctctgctctactgtgacaatatgttctgcctgtttgcactttctcagtctttgcacttctgctcctacccaaccccactgagcaggtctagctccatatcctggatcccacccataggcttatccacaccagggagagttccacccctggctatgtctggaatcaggacttgctgcatgttgattcactcattcagcagtatttattgagcaccatttagggatgtgattggaagaagatctagtctcggtgctcatagacctcatgtgaaccaatgaggaatcagaattgaattttgattaaactcagggaccctgattcctcaaaaaaaatgataaatttggagtaaacttcaacaaccctttaagctcaagcactcagtccacaaaatttctctatttcagacatttctccctagcccttaaatcctctgtctacaagctgattgactaatatattcagctaaggttataaaagcaaccagggtttcttaggcagccaaaaagaagtcagagagcgaagaggagagaaaaagccaagaatgccatagatcctggatcaggtgggccagctaggggagcaaggtgggaagtacaagctttttgatgcctgagaccagtggtttgagtggggagcttgcttgggaaaaatcagcagggtccacagaaatgaaaggggatgtctaccaggagcagctaagaagagccgggagggaggtctggggggctcctggtcctcaccttgttttagggtgctgcccttgcctttttcaattaaagaaacagaaacagcagctatttggggttttgagcatggaaaggtggaggacagaggagctgtctgagttatcttaagaatctggttttactgtttattgaaataaaatggtcagagcttgaaggaaaaagtaatttaatttataaatagttgctgatcactcttgtgaatagtatattctgttgtcttcagaaataatcctgtagacatcacctgcatgtcaatatttggttcagaaaatataatcaccagttgctgttattgtctataaggcacgatactaaattatcttgtcatctaactcagtttttatcattatctcttggtaattttattgaaagaaaccagtaacttgtaaatcataaaaagatgaataatcccagttataaattcttttccttaacagatgtctttaagacaatctgacttaagttctcaattctgactaatttttttctaatggtttttagagagctgcatcatgatctgtgtgatgggatatgtttgggaatggtggatttaaaatggatttctgatagtatatgaagggtatatatctttgaaaaaattgaaggcagaaaaatatacagaagaaaataaaagttccccatggcttcctcttttccaagaactaatactagactgtaagaggactgtgaggggcagatacattgtctgttttatgctctgtgcctgtgtcaaaaagtgcttggcaaatagaagggactcaataaatagttgtaggatgaccaaatgaatattttgtgcgtttccttcaaaccttttttctatagatatatgtatgaatactatgtaataatgattacttttatatctttaaataatattctgtatttcagttttatattccgcccccattcttttttttttttctttaaccacaatagatgtgtttatatacataagtttttcgggggatcagaagaaagtataatacaaatagtattatatgtggagtgatttaaaatgttttgtttatattttaatagttagtgactaagaaatttgaagtcagccttcctcctttgccttagtttctcagctacaaaactgtgtttgtagaattagcacttaggtacagagagccaatgttcagggatgataatgataaaatgatgttatatagataggattgagagcttatttactagagtcagaagagcctgaatttgaatcttttccctctcatagtattagattatgtgaccttgggcaagtgaccttggacaagtgtcaacctttataaatcttatttccttgtcgtaaaatgtgtttgcatttgttaggattggctagctagagtgtgttgccataacaagtcctggaatctgatcaattwagcaaaacaaaagaatgtttcttgctcacacaaagtctgagtagagcctggatagtgagtggcagtaggggtttaggttgcctactctttgttgtgctgccatcccatctaaacagatctttaatgtctctgcagcaaaggaaaaggaagcttggtgatggtgttaccagtagaaggtctccaggttcttggtgtcttgaacaaataattggacaaaacacacgtacaaagcaaggaaggaatgaagggttttattgaaaataaaagtacattccacaatgtgggagccggcctgagtataggggctcaaagaccccgttacagaatttttgggagtttacataccccctagaggattccactggttacttcggttatgccttgtgtaaatggagaggatgaggtaaagttacaaagtcatttacggattatgccctatggagagggtattttctgttatagctgaagtgtgaatcggccttatgttccctgcctccagaccctattttcctgcctcaatggcacactagctcttgctgccttgacaatgaagttacacattacatattacttctgctcacattttgttgtgcagatctagtcatatggccacacttgagtacaagggctgaaagtaaactttttaggtgcttaggaagaagaggagacccagaaataggtaagcactagtagtttttacaacagaggtgaataatagtaacttcaatcaaaattggtgtgatctaatcccctacccgcttgtgattaaaaaaaataggattacactttttttaaaaaaacctaaattattaggccaaggagcttcccactagcaaatcgctagaaataaattctcctcaaaatggcttttaatgattttgaggaattcccagggtcctgactcctgggtattttcaaagagatcttttaggtttccccattctagtcccttcatcttgccccaggctaactctgatgttttgagaggacttctttgttgtgcctatctgtcccccattggtggccaatgctctccctagttcttttcaggacacgataaggctgagttgatgagaacatattaaagtcttgaggataaagccagccaaacccaaggaacagcttacacctgataccaggtgggtttggactcacaacctcagatctacacctaaacttcagagtctccttttctgctagttcttagctcrgttccatcttttccctgccatagggaataaatcaagcctgtgcatgcttgagcacctagacccaaatggtttgccctatttctaggcttaaaaaacaaacaaacaaacaaacaaacaaacaacatctctggattacttcctcccaggatggctgccagtgggaaattcattttcctccagaagagatttcacagtgtggcttggctccctgtctctgaatatgtaatgcgacgcttgacagcactttactctaaatctagattattcatgcgcaaatcatgccaccatggggaccaatagcctatccagattgtgctttgtcaagtttgtatcaccttcatgtgacttttcttccagcagttgatgagggaaaatagggctttacctctctcttgatattctaggtccagctccatcacccaaaagcagatgcctggacaacttaagcacagtctctccagaacaatccagaatgtcaagcattgatcaattttaatttaagctttgggaaccaaaccaaaccaaaaaaacctccaaaacaaaaacaagaaacacccctatctctgcacatacagttctgttagtgcagccaattccatcgttaaatagatacagtatccccccttggaaagccccccagtagatgcctgaaactgtgaattgaaccaaacttgattcccatcaattgtagcacatttctgtttgtctcttccaccsacaaatttaatgccttttccatcttaactaagcacttgtcatagactgtggccataatttttgcaatttgaggtgcaacagtaaatctagaacgaatttatttttccttcttcacgttttcaccaatgaaattggtcttactgtagatcttagtaacctcagcatatgtttttttttctatcctttttaagctgagaactckcatctattcactgaaagaaagcactttatggcttctctttggcatatctgagttgccaccatcactactcttgcattttggaaccattattaagtaaaacaagggttacttgaacacaagcactgggatattgtggtagttgatctgataattgagcccactactgagtgactgagggacaggtagcactgacagcatggataccgtggacaaagggaggattcactgcctgagcagaatggagcaggacagtgtgaaattttatcatgctagtcatagtgatgcataattgaaaacttgctgtttatttctggaattttccatttaatatttttggactgcagttgactgggtgtagtaactaaaaccttggaaaacatgtctgaataaggggggactactgcatttaatgtgtttgtctgaaggttttatactgggtgatttctttggacgtagtcttccccaaggaggagagagaggtactcactgccttccatctacataaacaaaggggtcatcaaagtaatcctttccataacaccggctastttgtatctaacaacaaaacaaatacattcttcactttataaggcagaaacccacaaacggatgtttttacagctgcactacattttttttatttttatttttaaaatattattttagattcagggggcacgtgtatagatttgttacatgggtatattgcgtgatgctgagatttgggcttctaatgatcctgtcatccaagtagtgaacatagtacccttatcttgttccagttattagggggaatgcttccaacttttgcacattcagcatgatgttggctgtgagtttgtcatatagggctcttattattttcagatatttttcttgatacctaatttgttgagggtttatatcataaacggatgttggattttattgaatgctttttctgcatctactgagatgatcacatggttttgtttttaattctatttatgtggtaaatcacgcttattaattttcatatattgaaccatccttgcatcccaggattaaagctgactttatcatggtgaattcactttttgatatgctgctggattcagtttgctagtgttttattgaggatatttgcttctatgttcatcagggatattggcctatagttttattttcttggtgtgtctttatcagattttggtatcaggatgatactggttttgtagaatgagttaggaggagaccctccttgatttttttggaagagtatcagtaggattggtagcagctctcctttgtatatctggtagaatttggttgtaaatccatgtggtcccaggtttttttggatggtatatgtatatatttttttaattactgattcagtttctttacatgttattggtctgttcaggatctctgcttctgcctggttcaatcttcagaggttgtgtgcttttaggaatttattcattctctcaagattctctagtctgtgtgcatagagatattcacagtaatttctgataatcttttgtatttctgtgggatcggttgtgatatctttgtcatttctgattgtgcttatttggatcttctctttttctttgttaatctaggtagcagtccattaatcttatttatcctttcaaagaaccaattatctgtttttttgaccctttgtatggtttttgggtctcaatatcatttagttctactctgcttttagttatttctcttcttctactagctttgggattagttttttttttttttcttttttgagatggagtctcactctgtcacccaggctggagtgcagtggtgctatctcggctcactgcaacctctgcctcccgagttcacaccattctcctgcctcagcctcccgagtagctgggactacaggcgcctgccaccacgcycagctaattttttgtatttttagcagagayggggtttcactgtgttagccaggatggtcttgatctcctgacctcatgatccacctgcctcggcctcccaaagtgctgggattacaggtgtcagccaccgcgcccggccaagattagtttgttcttgtttttctagttcctttatgtgtgaagtttagattgttaatttaggacttttctatcttcttgatgtagacgttttggtatgttgtgtttctgttttcatttgtttcaaataattttttgatttttgccttaattttttgttgtttacccaaaagtcattcatgtgcaagttgtttagtttacatatatttttatggttttgaaggttcctcttagtgttgatttctatttttaatccctctatggtccaagaagatgctttgtataatttctactttttaaaaattgattgagacttgttttatgatcaagcatgtggtactttttacagtatgctccatgtgcagatgagaagaatgtattttctttggctgctggatgaagtatcctgtagatgtcaattagatccagttggttcagtgtccaatttaagtccagaatttctgtgccagttttctgcctcagtgatctgtctaatactgtcaatgtgttagaggtcccctactgttatcgtgtgtctgtcaaagtcttttcttaggtctaaaagtaattgttgtataaatctgggtcctccaatgttgggtacgtatatatttaggatatttaagtcttcttgttgaattgaattctttatcattatgtagtgtccttctttgtccttttttactcttgttggtttaaagtctattttatgtgactcaagattagcgactcctgctcttttttgttttctatttgtgacttcactataattttaaagcccagttcccactagaacttcgttttgttagatgctttgactgtaataaaacagccttcgatttttccatttttatctttttattcattatcttttgtaataaattccattatgcataaaattttagtggttacttctgggatcaagcctgttaacccactcacacaattaaattttcctttctgactttattttttttcccccggtagctgagtacctttcttgatgtaacattgagtaaaacattggctatttatacatctaggctttcattctcataagtgtgtgttttaagcatgggtattaatttcattatgtgggtccaaacctgtctctgacttggaaatgacttacgggtgcacatgggtctgcatattaaggtctcttgtggctgtgggagtgagtgggagtgacgggagctactgtgggcattcttktgtacatctggccatagcagtgggtcccaggctagatcactggcacttctttaattaaggctctgtttctgcccagagcaaatttgaggttctctgcttcttttcctattgcagaaggggccctacctaggaaggatkttgaagttctgtttcttcctttattttttttttatccttttggatgtaacagcgcaccaaccactgccagagctgacagaattggaatggaagtaggtgggtgggggttgggggtggaaggagggatggcagtcatcagtttgggaacaacctctgagccaaagaaatgcctttggcatatgagaacagtgtgagtttatctcttttcctgtttggaagaaggtacactataaatccgactctacccaggaactgtttatgggagatcgttattaaagaatagatatttgatttttccattggtttggagaaactaggagtcaggcactaaggacgtgctgtgtactcawaacttttctccagctatccataaggctaatatacatttttgacaggaatttttttaagtaagaatttttttttacattgtatttatagatgtaaaagcactgagagcttcattactagaaagcagcccctatggttttcagcattgctagaatcaagagatgatattcttgttgactrttgaccatgcttttccagatcacccactgttgcacattcatgaaattggagtgagcawacaaatttgttgagagaattatcttaactagattcaacctctgtgcccatgaggtactgtcattctcagtgattcaaatagatatttgggtacaggtggtcatgtttggcgagctggtttctgtgcagattcagcacctgtggtttgtttcatcttatcgttcagacacagatgctcttagagcaccacaccatgcattccaatgaaatctttccactgaaaccataacctctgtgatcctaaaaggaaggagtcagtgtacagagggacatgacatattcaaaatcagaagttgggataagccagaaggaaccttgtgggattaattttcttctttaagtgtgggtaatgtttttcgcatgccctcttttcaaacctcagcacttcacttgtccatctgcattttctccaagtattgtaaatgtcaggtttgtgtgaagaggcatctgtaaaactgctggcatgaataatgactctgatgtttatgtacggaagagcgcacctgactttagcactcttattatcttttactaattaaaatcaagaagatgtttcagctagacattgcctgtgcatagcacctgctggattgcttttctccttttggtgtttctggtttggtggaaaggcaagaaaggtgagctgaatgacttggagcaaggaacagtggtgatgtcccatcactctcggacaagcactccttagcctatttaaatttatttttctagttctcaaaataataaaaaaaaaattaagacttagccaccctttttatcagtgaggaaattcaggctcagagaggtgagctcatttacctagttactcagcgtgtgacaggattaggatttggacccagagtcacttctgaagcttgttctacttccaatcttataattaccttaaaaatagggtgtggctgtatagaccagcttttgcatgagaaaagcctcattgttcatgaatttagtttatattggatggttattttaaattatagtcatgtgctgagcattatgtcaccagcaaatcatagccgttttccagagatatttccctggttaaatattcacatgacatttgaacatactgaacagccaagcatgttgcttagttgttatggttgtttttgtgcggggatatcgggtaggggaggggattaaaagtattgggctggtctggctaatttctagtctccatttcttgcagacgacctctgattctctggttttgaagtagggaagtgtgactgtggtgaatcccaagaaacagcttgatagctttacaccatacacctgccattgctgacatactttggaggggactgaagtggagatgcaaagcagtcaggctgtaggccccagggagcttatgaatctgacctcaggggtcctccctgtagagattcctcacaccaaacatctgaactcatgtcaggcagtactgttttaacctcactttttgcccagaatgatgggaataaaatcaaaattgacagacagaggaagctggtctttcctccagaattgataaaccaagatactttaaacttattcccaagaatgtggatttctgcatgtatgtatctcttcaaggttgcataaatggaatttgtgcttcaatttgtcagaatcctgaatttccaaatcctgatgtaaggatttaagtaggagagatacctggatttgaattgttgtgaaatacagtggtaggttgactagctttattccaacagagtgagrttgatagtctttgttgccatgagatgcttcaccttttcccctaccaaccttcaaagacatggtggagcggaatcactgggcaacaccagtgggaatagttcaaccaacagtagttctcacttagcagagacagacctcaggttcaaccttttcttgactgccatttcgattctgcaagtggcaaaaataaactggaaagtggatgatcactctcatatgctctattgacaaataagaaaaacagggaccaaaaacaactttytctgggcagtctggggaataaaagctgctgggaggatctagtgtacacatgcgtgtagcactttttacattcgctaaacccttttatagttactctgtcattggccattctgactatgttgtgtgcagggcaaatgagttttgttcttcccattggagaaaggctatctaagraagacccatgggaaattagcaagtaagccagggctggagttcccagagaggccctgcatgaggtcccataggaagccgctaggatctcgaggtctagtcgttatttttcctctttggcagattacaccgtaactctgaaagagccagggaagcctaggttgtttgttctttagagtttttaacatggaaggaggtttagaatttattttgcccgtcttttcattttagagatgaggaaaatgagacccagggagatgtgatttcacaggtcaaatagtcctatgacactgggtagacaataggatacctgatgtgaatgttgaaaaatgtgccgtaggagaaaacagccctttaggcacttgacttggcaagctgaggttacttggtgcaaaggaagagatgcccttctttcaggtggatgtagatccatgctgagacacgtggctcagagtgctgagcatgggctggatttcagctcctgatccctctattttcagtccacaaactgcatactctgtgaagtggctctgcatggttttgctggttcacttaaaacatatttggataaaaaacatgactgaatgagggagtcagcttttcattaggtagaggaggtgtccatatgtctagtaattgccctcatttggcacaaatcaacgagacctgagggatgagggatgaatctgtgtcttcttttttatggttatgggcatgaacagttaggatgaaaccagacctgcgtgtwctggtttggctgatgatggatactttcaaaattgtatcaaagaaaatagacaatggaagtctggcagactttacaatgagtatctagtaaatcggatatgaaaaggaaagsggggggggaacctcatcttctctgtgaatttctaaaaaagtgttcacataagacagggctagatagtttgaaggatattttccaagcccaaaactgtacaagaggaagttttctctgggagctggaatttgaatggacaaagtcaggttggtctcagtggttaatgcttaaagtttataaacacatctttttgtttttagcacatcctacaaatgcagtttattaatatggcattttatattgaaaggtaaatatcaccataccattgtgaataattctttggtagtgaaaatagccctatcttacagtgactagatccttcttataaatgctcttcaggtagcccaaagttctcctttgtataacccattataattagattatacatataattgtgtagaggtatgtatttaatatgtgtctctcctagtagcttggagtcagtatagcacagcagctaagggtccagccctcgagatctgctttcaaattctacttttgtcacttagtatctacattacaccgattaacttaatcagtgtcatgtggtcctgctaactgcattaatttgtctgtatttcattccgcatctacaaaatggtaataaacataggacatattttatagggctatatattgaatgtattaaatgagaaaatccttgagtattgcttagcactgtgcctagaacatgaaaactcttaataaagcttggctattagtcttgctaaacggtaaagactgtttctgtcttatcccttgtgttatccccagttctttgcacagaacttgtggcacgcagattaatcatagaaattattgaataaattaatggtcccatttttttcctagctccactgtggtgaagtctcagattcccaaggatgtggttgtgtgcagataggttccatgtggccagggctcttgttcagtttagtgtatttattctgccacactttgcttaattccagattgatttgcttttatatgaagatagtaatatatgggaggcattgattcttagcttcttaaaaactgacagctaatgtttagaggcatttcaaaatacagtatctaaataatatgtagggaaacaggagatgtaatttgggttgataggaaatgccttgggctcaagtaagaggttctgggttccattccgaagtctatcagagatgagctttcatgtcacctgcttaaacttaactttttttttttttaataaaacgaagggactaaagtccattatcatcaaggtttttgcttgtgtttgtattttatgacagtaagatgttagttacttttattaattccttaaatgcatgraacagatwtgcctttatattatgaatagaatgcagattcaatttctgcaaataatgtttctttgtattccagggaaacttgctgttgaaagttctccttccatgagtatttcttgtaaatcaagaatcttttctaatacaaatagttatctcatgtttctgctttgaaaatttgtatgtattttttttttttttttttttttggtgaaatgaggcatatttgaatgctttgaagtaaaactaataccatttagtgagtatgcacagacccagcatagggaactaagtatttcaatgtttatgattttaaaacactgtcatrtttcgtgctgtccaatcacgtttagctttaatagttttccgtccaatttttcggaacccaccagacttgatttttaagagttagttcaaagattgcccaaactttgattcaatctggcttataagagataacaaagattattatttaaagccacagtcattagtgatatgagggtagatatgaaaaagaaaaactgaatagactgcttatctcttactgtgatctgtatgacctctgattaatttaatcatggttctgtatctaatgttgagggcctgcaacaaggtcttgattgacaaaatctattttctcttcatactcattcaggcttcttggaagctaggggtttctgattaaattatgctatttttgtaacccacagaagatcccatatggtcaatttcaagttcccgttactttcagtatttttcctagatgttatttcrcttaggacaaacaggatgcaatttgtggggtggttgtttgaccttctcgtattaaaaggttgtaagtgttgtctctttcagctgcccattttagaagttaaatttattgattgctgagcactttagtgcattctctcatttattcttcacagcaacgtgaagaggtaaggtctgctattaatcccattttgcctttgcaaaataagccatagaggagctaaataatttgcccactgtcacacggtaagaggttgagccatgtctgaaattcaggtttatttggctccagaacccctacattagccttacaataagatgcctcgtgcaacctagcttgatggagattgcatgctaaatatattttaatactggaaatggtttactgatgtttccagcattcataatgatcaggttgcaaaatctgtttggacatttattaagagattggaaccaaattaatgacatcttctctgaaatttctcttggcttatcttaggagaaattagaatgaactgaagcagggaaggataggaaagagctatgtgaaaaattaaacactgtgtttaccaatgttgagtggctttctacacaacatgtgtgatctgtgtgtggggccctgtgtccagtgctcaggttatggtcctactgtcattttcagccactgttcattgatgtacactcactgttcagggtagtagagtccacaaaagcatgcaatgtcactgacatagcggacrgtagctagcacaggcgtttagtgtggccatgagcctcagctcttgctcctataatttcatttctcaggaattgttgttcttccctgttgctgggtcttggtagggtctgctctggtctatcctaatcggtgtgcttaactttacatttggagtactaagagttgaggttttgcttcctttcttcccagaattgctttggaatccttatgcagtttgctctgctttctttgtagtgaccaagtttatatactggcacttckgaatcccaagaaaatgacttgctattcaattgacatttcaaaatctaagatggtacccttgcaaccaagaaaatataatttattttataaaagaaaaaacccgtctacctcatcatatgcatcagatatacaactaaactgtggtaaatgcttgtacaccagtatcttcagggtcctggggagcacaaaaagggctacttggccaaatatgacagatgattcctgatttgactcttgggggataagtaaaatctaaccagatagagaaaggtggaaagagtattcaagcaaaagcacaggatgaacaaaagaaggaagcaatgaattgatgattagtaaagcaaaagcaaaatagattagcgttgctaaaacaaaagtatgaggcagagggtagcaaaagataagtttgaacatataggtagaagccctaaaatgcaatgccaaggagactggaatttattttaggttacagggcacccctaaagggtgttaaatgggacagacgtgtttttcacacagatgagtctaatttcagcataaaagatggatttcagggccagtagctagagtggaaacagggaaatcagtgaagagatgttaacatggtaccaatgtgaaatgagaaaggagccacccagggtaatggtaatagggatgcagaagatttttcaattatatagaagggcaaattgacaagccatcatgatcagcggtgatgtgtaaaggagagggagtagttgacaaatatttattgatcacgcactctgtgccaggcactttaaaggtcatgagtcacagaagtctggatttctaaaaatctacagaatgactgcaaggtctctcattgtgaattcattctctgttgctgcattggaaattgccctaaagcttagtggctagaaataatatttattatctcacagatttgtgggtcagraatataggagtagctgagctcggggtctctggctcaaggtttctcttgaggtagcagtcaatttgttggctgggctgccatcatctcaaaacttacctgggtttgaagaatctgcttcgaaggtggatataggtccctagtcacaggggcctctctgcagagccacttaacaagaaggcagctggttctccccagtggaagcactctaaaagatatgacgaagagcacacacgtcagaaactgaagtcttttaaaatcttcatcttggaaatgacgtcaccagccactcctagattcctgacccgcaaatctgtgagataataaatgttatttttagtcactaagctttggggcaatttctaatgcagcaattgagaaagaattcacaaggagagatcttgcagtcattctgtagatttttagatttttatcatctcttccctgatctccctgctcccactctagctactggcccccaaatccatcttttatgctaaaattagactccccaatacttctgttgtattctgtttattagaagggagtcccaaagtccagctcacagttagaggagggaattacacaatggcataaatgccaggagacagggatctgcaggggccctttgagagactgcctaccacacctgtatgactgagtagatggcagtgcattaatgaagattaggaatgcagttgaaagagattttagggggttaatgaagagacttgtttcagatagaaactgttgcctattcaaatggatctgtgcagcagcattagtaatggagaagtagattggagggtggtcatcgttttataggtagcatgtgaaaccatacaagtgaccactaccttacctccttacaaatcattgctcagaggccaccctttcgatgaggtctgtcttcaccaatctcttaaaattttaactcttttttcactctaatatcccatctccaccttttgagttatgcatagcacttaccatcttctgtcacgcccatgatttacttattgttcattgtctgtttcttccaccagaatgtgagctcgattaaagcagagttctttgttttatacactgatgtacacttagtgcttagtagagtacctgatgtatagctgatacgcaatagttatgcaaagaaggataaaactttgtaaaagtagtacatctaagccaaaggtggaaataatccaagtattcattgatggatggatagataaaccagatgtggtacatacatacaatggaatactatttggccttaaaaagtaagaggattctgccacatgttacaacatgagtgagccttgaggacattatgctaagtgaaatgagccactcacaaaaggacaaatacagtatgatttcacttaaataaggtacttaacagtcatcaaatacatagagacagaaagtagaatggtggttaccaggtgctgaatggaggaaggaatgaggagttattgtttagtgactgcagagtttcatttggggaagatgaaaagttctggagatggttggtggtagatggttccacaacaatgtgaatgtagttaatgccacagaacagagcaattaaaatggtttaaatgatacattttatgttatatgtattttaccaaaaaaaaaaaatttcaaaggttgtggacgtagtaattaagataaggactgaagaatgcctattggatttgctaaaacagagacctcagtgagagctggttcagtgggacactgggagctgagatgatactgatgagtgattgagaagtgagggggatacgagctagaggaggcttctttataaagaatgggggggatctcagaatgtttcaggctgggagaagtggtagtggggtgcatgtgtgtgtatgtatgtgtgttgtggagactatgtggggcggggaggccacttggagatacagctattaaataagtgaacaacaatacaaaaggcgggctgggggaagggaggaaggaaaccgaaggaacctttcctgtctacttgtatggaggagtaatgtctgaaattttccaaatagccaaagttgtggcacatgaggaggtttggagcaaacattataatagcttgggttaattatcacagtctgcaccattcagacagtgtctatcagaacccaggaacagcctataagactaagctgtgccaaactgtggaaaggggtcgatggtttagggcagttagggctgcaggttctagggcagttatcatcatgaaaggctgtgataagacattaactgttgaacattcttacagcatattgtattgtaatagactctgaatttgaatattttattatagcaagtatgttgtatgcaaagtactcaggcattgcaaatcaggcaaagttgaaaacaccccagtattattagagctctaccacacagattctgcaacatggggaaactcaatttaatrcattttcattgaatacctacctataagcctccgtkgtatgaaaggcatacaaaatgtgtatttactatatatattgtaaagtgattatatatactattgtgaaactagatcactatttggtctactagctaatatttatatagatggtattagcatagctattgccacataggcaaagagatccatgttacagatgacagaattgcaggttttctcaagaacttctagtggattttaaagtattattggaaggtggaaacttttgttcagacacaaaagtgttgtactgaagtaaagattgctgcataaacatgcagtaatttatttaaaggtacatggtcctactagagcatgggcagttagtctagaggtcctgatcaagcatggtgtaggacagagagcttgtgtgggatttctatgtgggggcttggcaattctgggattaatttcagcaggttcctgaaggtcaagtgggccaagcttcaaacagaagacctgtggttatgtctattcagtggcgaggccagatttaggaagccgagaaatcaaacattatgaggaacaactagttccagaaatcaaggtcaggcaagggcaagaatgcaaggagaaatgtgagtcaagatagtgtcattgctgtcagaatacacatatgggcctgatttgaagaggaaagggtttgttctagggtttctttcagagtgagaggtttactacgtatggtggtgctaaggcacataatgatgatgaagaagaagatgacgatgatgccrtaatgataaaagctgccatttgttagatctgtgctatgtggcaagcactgttagttcaacaaatatttttagtacctagtatgtgcctacatactggggaaagaacaataagcaaaacagataaaattcttgttctcatgaagcttatgtttacktggaaggagacaaataataaatctgtaggcaaaaatacaataatctagagaattataagccctttggaaaacacagaagaagcagagtgaatgaagacggtttggaagagggtaaatgtttcatgtacgatgcttaggaaaggtctggaaatttgaacagagatataatactagtatggagacaagccaagcaagtttggggaagactttgaacagagtgagatcaggtgtgaaggccccgtggtagggaattgcttgacaagtaaaaggaatagcaggagggccattgtggctgaggcggaatagtaggattctttagagcttttgcttgtggccatcttaccagctttgcctttgaacctagtgaaatgagaagcccttggaagcttctctgagcatcctgaaacttaggctgtattatcctccagatacttgtgtgagataggtaaaattattattgtaccttttacattaatgaaaaagctgagacatggagagagtttaagtgatttgcccaaaaccagctctaaagctttggaatgaggatttttaacgtggggagtgattttaggttgcacagaaaggatggcaaagggacacaaggacattttgcggggtgatggatgtgttcattatcttgtctggctggtttcatgcatgcatatgtatgtaaaacagtgtgctttaaatatgtgtcatttattgtatgtcactgatacctgagtaaactcataaaatacgtttcaaaaatgagggagaggccttgatggagtttaaagcagagaaatggcattcatattttgggaaggatggattagagatcaattagaaagccattacaaagatccaggaataaaccagtaaggaactgaaccaaggtagtgtagagaggaacaagagaggactttgactgtaaagatgacaagacttgaaaggtgatgagaatgaggcatgagagaaagaaggaattgagcatagttaccaagtcggctgtgttcagaggtgaaccacggtaccattaaccaaaacgtaaaatcccagaaaggcatcaggtcctgggaaaggtgatgacaggtgtagacagactgtgatctggttgttgtgggatatccaggacaggaggtagtttaacttagggagacttctggttgagaactagagatgtggagttggtgtgtaggcggcctattagagctataggcatgaatgccatgccagagataagaaggggtggaggagaaagctcgaaagctctggggagcaccagtatttaaaatgagacatagagaaaaacttggtctgcattgtgccctgtatctcatttcaaactcacaggaaacactgattgtcagtcacaacactctttccttcaggcgtctgtcaacacagtgttggtagaaaccactgcgtttgatcagtgtcaacgagcaagatgaatcctcttttccacccctgattttagtagtgaacatggaaccattaaggagatgaaggagtgtttgaaaaagttagtagaggcccaggagataatcatgtcttgaaggccaagaaaatttcaagaaaaagacagagtaagatacagacctcactcttataagaactgaaacatatccattgtttttggccattagaaggttaataatgactttgtggagtgtggtttctatggcatgagagggtaraggtcaaattatagtggatccagggatgaaagtgaggactgtgctccccggaagcacaacttggaagtgaagaagtaggaattttattgaaaaagtctgtgttctttttataaatttctttacaaatcaaagagttatttagtttttatagattgtcacatttatttcttaaatataggaatatccttggagtctctttgctaggagacttttgggcacaaagcagatgcccttatttctgggtagtttcctgacctgaagtgtgggacaagactacctgagccttagagccatctgggatggtttcccagctgctggtctaccagcctttgccatctcagagtaagagaagttgcacatggtgcaaagaaaagtgagaaaactgagttttctataaagagcactgctttatcctgagattatctttttttcttatatttgggttgaaatgtctttgtattagtaggcagtatttttttcttttaaataccccacctagcaaaataaaaatttggcacctctctgagttactctgttttttctcaatgattctaattccttaattccttatgaacagcyatcttttttgtgtgttttaagtttttatcttctctaggccagaattaatttggagaacgagaactaactagaacaatgatattgttagtcctcaggagctacaggcagatggcctatcacccaagaactccaaaatatagtacatgagattatcctgataaggagattattcttcctaaaattagagctcaaaatcaatcatagtagataagtgtgtaaagtcaccttgaagatatagaatagctcccctgccagccagatttaactttcatgtgattaaaaatattactatgtctaaggaaagaatgtgttaatgaacaaagaggttgattggctatgagaacatgggaaaccatggggggaaaagctggtgatatctgtctgagcactggttagacaagaggaaatgatggcagatggaggcctgaggatagttaggtttcactggcagagaccagatggwcccactggattggagaggccyggctatgtgagcctgatgtcaccccttaccctcaatgcatccagctttccttcatcttttcccatgcctactctttgcatttgacttcccaagtaggaggagaatgcagtagtgctggggctaaactattgcttctcatacagactgaaagtttaagtccctgtgtggatcatttctcgatagaattttttaaaccagcattctggatttatccctcagtctcagctctggtagaaaaattctttaatgtgctgacaaagtctggtttctgagcttgtggtgctgaggtctgattgagcctcttgtgccttcagccaggaggaccctggctttccttagatgggagcagactttgacgttaccactgtgttggaccacattgtgacttgctgtaatttttcttttaaagtttcctccaaaattaccattttaaaagaaacaccaaattaaaaacatatttattgaccagacattctgcagaaaaccatgttcaagaataacttttgccatttttcactagacaatttttagaattttgtcatttcaacatttttttctttgtttctcactccaaacttctgtaaattttttattcactaaattttgttcacacaattataggtagtcttgtgatgattgtctccaagctggttccactttctttgtttttaattctgctccgatggattatttgtcttgaagatcttgaaagaagttgataaagaagagcttaatcatagcaaaatttcttagattcttaattcggaccacaagcaaaatggtctgttttmagcttctgctatgaaaaattacatggagtttttctcatggtttcaaattattttattcctaaggctcaaggctcttgatgtgatggtgaacatctgggagaaaaacttaagaaaaaatgtagtcatttgaatgtttgatgaacagtttgagaagttcacaaatttgtaaacattctgattttagtcattcgggttcttcccctacttctttcatctgctcttgtcattatgtaaatagagccctacagaggggatggagaaaaattagtttttgtccaaatattcctctcttttgcatttgatcagaatgttctctgttcttgacgatgggtgataaaattatgggcaaggagaagctttgcagaagggcaaaaggagtaagctggggctctgtgagtattgcctaattgagtggctttgctcaaaaatctttttctttttgatgataactttcttgtgttgttgtcatattacatatttagaaatgaaaataagatgaaatatttacttattgaacatctgcttttctcctagatggggtcacagtctccaagttccctgtttatttaggaaagattggctggtaattcctgtcccctttcctcccttttgtattactttagatatctgattattcataccatctctgttaaggaaaaaaatacttatttccatggaaataacattaggaagtggctttgggagctaaaaatcttcttttcatgagaaaacatttttttttcttttgcagatcttgaaaacaacggcatccttaacatacaatatacacaaatagatgttttgataaagaaaatagatccatataagaactattttatctgagtttacattagacctgcaataacatagtagtgagttgatactaggaagccataaagtcataaaagttttaccagtatgcttaagagaagattctcttgaggaaattaaaacagaagaagtgatatatcataatctttcacaaatctgtataatcaatagcagagatcaatagtaatatagctaaaaatctttgaaccctaaagatattttttgaagggacaacgttttaggaattcttagctcattcttggctgacgtctccatgaaaccagggttgtttgtgattttgcttcataggagaatccttgatcactccgtggaagaacttgtagttccagaagaagaaagctcatgatcatagaatgtgtgatttattaaattagaatctgcattttgctcaaattttgaaattctcagatctttttaacaacaaacatcatgatccagtaccattatattttggttaataatttcggtctaacagagttgtttttggtaactacggaattatcttacctgattttctcagaatagtgaccatgagaaaaatattttggaattggacttggattggaagggaaaagtggaggacaggagaaatcgatcagaagcatttgcagcaatctatgtggacatggctcagattggcctgtggggcagaggggatgcagtgaatggagagcttcaagacatatgggagagagagaattgactgcattcattcatcattgattgtggaggttgagagtgatgaagtctgaaaggaagatccctagcaactgaagtgagaaaaggaccattgcctgagaggggagaaggaccaaaagttcagtttggtgcatggtagttataaaggatcttcagggtgagatatagagcaggcagtgggagataggagttggggtttaaaagagtctcttggtccccagacaaggcatgttaaaatagctgacatttgatgagctttgagtattctatttaataactaattttagatactgtactatatgacagctataaaaataggagctgatgtatctgaaaatatccaaaaagaaaacgaaagaaatcacgttgggtctaataaaaatcagtcagtagatttaaagagaagaagagagttaggctaggagagaaatgtaaaactcccaatttggtctctttcggtttcatttacatggaaatctatgcttgaaagggaaatacagacgactattagaagtcagaaaacaaaggtacaggaaaagaatggaaagtcacctgggtttcccaccacttgtagttttctaaggttaattaaatctatttgcattttataatgagaaaaatatcacaaccttttttttttttaaagaaaacaagctacctttttttaaagtgatttgaaatagaaatgcctctgctagcttctctttttcatgctgagaggacatttcccagcaagccccaaggctttatcgtcttgtgatgtctccaggtcacctcagggacatagtggtataataaggaaaaccaaagggagaatggtagaggcataaaaatgtaatgaattgggggaaggttgattggaccaggcaaaatctggttattttgaccctttgtcaaggcggtcccaggtgtatctctgcccagaagaatatatttcaaatgtcttcagctgtagacttctgaagctacagatgattccactgatttatcacttctcccgtaggttgacaacattttgatactcaaaatgcagggaggaaagaagcataagaagtaggtatgaaagagaaatcacaggctttgggagggagtggtattaaagagcagaagggggataatacccacagaatacctgggatgagttcctcagggaatccttttcaaaccttctcgccctccccacctcatccccttctcacctctgtataaagagctttgcccttttctcctctgcttttcctcctccatcactggctgcttctttttagtctttttgctagaaacgatcttaccttctcaacttctaattgttggagagcccctgggtgcagtatgagtatagcatttcttttcttctttattcccagctactccctacttggctttcatctgttcctgtaactttatataccatttatatgctgcagatgttcaaatgtacatctctagtgcttgcctcccctgcactccacacctcctacttgacatctctgcttagaagtcttgtaggcatcttaaactcaatttgttcaaaaccacatctgcctaattccaatcacatcccaaacacttggtcctctgtcaatgtccccatctcagtaaatgtaccaccatttgtcctgggaccttgagtcatccttggcttttcttttttaccaacaattcatcattagttcattaatagtaatccattagcaagtggctctgctttcaagatatacctcgaatcttaccacttcttaccaccagcacagttaccactccaatccaagccatcactttctggactgttgtagtagcttgttaaatgatttctctagttatacccctcccctttcaaactaattcagatatgttctccacataccagcgaatgtgacccttgaaaacataaagatgttcatatcatttcctggctcaaaaacttatgttggtttctttttgcccttagaaaatccaaggtcctcaccatggcctataaatgcctctggccccagatgcctctccagccttatctcctgtcacctcctccctcgcttgctgaggtccaacctcacccactttctggctgttacctgaacaagctaaaaatctaagggactttgcatttcaagttacctttgtctggaatgttcttctaccaaatattcaattgactgtctctctctctctctctcttacctaatgtaggggtctgctcagaggatgtcatgataccttatcaaaaggaaatcatgggccaggtgcagtggctcacccctataatcccagcactttgggaggccgaggtgggcggatcacaaggtcaggagatcgagactatcctggccaacatggtgaaaccccgtctctactaaaacacaaaaaattagctggatatggtgatatgtgcctgtaatcccagctactcaggaggctgaggcaggggaatcacttgagcccaggaggcggagtttgcagtgagccaagattgcaccattgtactccagcctgggtgacagagaaagactctgtctcaaaaaaaaaaaaaaaaaaaaaaaaaaaagggatatcatgataccttatcaaaatcagcatcccttgccctactcttgatcttgttcttcatcactgctgtcatgatttcactgtatactaagagtgtatttgtttgttgtttgactcgtctcccaggcagtaagctatctcaagcgggggcattgttgggcttttttgttttatgcccaccatccagaagacttcctgcacatgaggcgtaactattagctccataaatactagctgactgaatagcaacgtcagtaaccaagggaattggtttttgatttgcgtggctttttattttgacagccttggaaacaacagtgagtctgcccagttctcacaagtgtctagcatggcgcctggagcagagtttgcacatataaatgtgttgggtaaattagtgaatgaccaaatgaatgaataaagtcactttagtgctttaatcaccagtacatcttcagctaccctttagacccattcattacacagagttactatggcaaaggaacctaaccttgtctaagggttccatgaaggcctccctgaggagggtacttcatcatcatcatcatacctaacaggttctgagcacttactatgagccatctactgctttatgaactctaactgatttaatcctcacaacaaatctatgaggttgataatataattagtcccattttacagatggggaaaataaggcacagagaagtagattcatttatctcaggataggtaactaataaatggtagtctgtttccagagcctgtgcacttcaccactcactatgctatactttttttttttttttaacgtagtcaactatttaattaagttcttaagacatttagaacaccaatttgtgaggataaattccattcgtcagggcaaccacagatcacaggtagccctggagctgaggaatagctttgatttttggtaaaatttgtgagtccacagctttctgctcaatcttgcactgctccgtaatctcatatttctctttttctgtgtcgaagatctcaccttcctggtgtctgggcttccgcagcttcttcttcttgaagtaagcatcagtaagatgttttgggatttttacattgctgatatcgattttggttgaggtggcaatgacaaatttctggtgtgttcttcgtagaggaactcgatggaggaccagaggtccagtcacaagtaacaagnnnnnnnnnnnnnnnnnnnnnnnnnnnnnnnnnnnnnnnnnnnnnnnnnnnnnnnnnnnnnnnnnnnnnnnnnnnnnnnnnnnnnnnnnnnnnnnnnnnnnnnnnnnnnnnnnnnnnnnnnnnnnnnnnnnnnnnnnnnnnnnnnnnnnnnnnnnnnnnnnnnnnnnnnnnnnnnnnnnnnnnnnnnnnnnnnnnnnnnnnnnnnnnnnnnnnnnnnnnnnnnnnnnnnnnnnnnnnnnnnnnnnnnnnnnnnnnnnnnnnnnnnnnnnnnnnnnnnnnnnnnnnnnnnnnnnnnnnnnnnnnnnnnnnnnnnnnnnnnnnnnnnnnnnnnnnnnnnnnnnnnnnnnnnnnnnnnnnnnnnnnnnnnnnnnnnnnnnnnnnnnnnnnnnnnnnnnnnnnnnnnnnnnnnnnnnnnnnnnnnnnnnnnnnnnnnnnnnnnnnnnnnnnnnnnnnnnnnnnnnnnnnnnnnnnnnnnnnnnnnnnnnnnnnnnnnnnnnnnnnnnnnnnnnnnnnnnnnnnnnnnnnnnnnnnnnnnnnnnnnnnnnnnnnnnnnnnnnnnnnnnnnnnnnnnnnnnnnnnnnnnnnnnnnnnnnnnnnnnnnnnnnnnnnctcactatgctatacttctaagctgaggactgaggatggagtattagctggcttgatggaggattggaattaggcagaagttagcattctgggcaaatggaaccatgtgtgccaagggccagatcattgccagttccatgaaagacatgacaggtttagtgtaaccagggcacagactgggcatataagagggtaagagctgaacctggttattaagcaatggccagattgtataggcctggtaggctgtgctgagtttggacttaccttaggcaaagggaaacattaaatggttttaagcaaaaatgttaggtgtacagatttacttttttaagcagtcacattggtgaccctgtagaggatgagaggatgggctggaaagcaagcaggtggagggcagggagaccgttaggaaggtctcacaatagtccaagaaaggggtaatgatgacctggtctagggtattggtagaggcagtggagagatagtataggtttgaggtaaaatcaacaggccttgtgacttggggtgaagaagtgggaggtgtacagaaattgaggatgactcccagatctctggcttaggatggcaggtagaagatgttatttatagggaccaattagttgatcaattctcttctaggattttattctacagatagactagttactagtacagacacacaagcctttatacagaaagacattcattgtaggattgtttgtagtaggattagaaacaatgtggtgtagggccttgcacaactccaggatctgccattcacacagaatacaatgtggaggcctccctgaatttgcacaactgataaattaattcccgaattacaggatgtccaaaccatgggatataatacagcagttaaaaagtaggatgtgagtctttatggactggtaatggttgccaagataggttgttatgcaaaaaggtatcctatgatttgttttatgtaagtctattcatacacacacatatttacacttgtaaacacgtaacatagttctggaaagatacataaaattttgtaacagggctgcctctagggtagaggattaggagacgatagtaaaaaagcttttttgtcttgtctsatttttaaatttgtatgcattacctgttaaaataataatatgttaaaaatacatcatggagacttgataatgcagtgacaattaagtgattaaccaaataggaataaaggaagcgtgatactaatttataattacctttccattgaaacacttctgaaacaataaaaatttaagccataataataaatcccagggcaaaattaaatatgaaggtaataaatrtggggctttgaaatagtgtatgggggatattaccaaaaatcccacctggcaaattattataaggactcaagactttttcggccgggcrcggtggctcacacctgtaatcccagcactttgggaggccgaggcgggcagatcacaaggtcaggagatcgagaccatcctggctaacacggtgaaacccggtctctactaaaaatacaaaaaaattagccaggcgcgatggcaggcgcctgtggtcccagccactcggggggctgaggcaggagaatggtgtgaacccgggaggtggagcttgcagtgagccgagatcgcaccactgcagtccagcctgggcgaaagagcgagactctgtctcaaaaaaaaaaaaaaaaaaaaaaaaaagattttttcaagtgtgaaaaaccttaaagttgatgaattttagattgcacttctagttataatattagttgctcatgaagtatggggacctcagtgtctggcaggcaagtattacagctctagtgtaacttaaaggatctgctgtgttcaccagggcatgtgagaatcgtctgcaaaatgaatgcacactataagcaagaagaatacagtgaggcgggaccagaatattagatcaagtttgccattctagccttctttagattcttatcctgcacgtaatcatgctgttttgagaggggtcaggcttcaccagccctcacttatctgtgcagccatgaaaatgtttcaggaccaggttactgtctttttttattcagaacttccttggattttaggtgaatttagaattggaattagtttatagttgcagtggtaaaatttactattggcattacgtggatggcagaaaaccttaaaaaaaaaggcctgagtaacagaaatgacaaagtaaaggtaaattccagctagagagtacttatttctccttactcctgtcccatctgtagtaaaccagtaactcaaactattgaaagtataatacgtatatatctttgtgatttgcaagcacccaggtgattctgatagcaataaagtttgggcagcgtggtgctgaagagtgacactgccttcccaaccagcctcagatgaatcccgtcgagtacttcatttgtgaatcccttcttcaatatcattctgcttgggggcctatggaggagcaaaactctgctggaaaactctgatgattctgcctagaaaatgataggtttgtgttccagggggacgtggagatatattacttctaaattctctgatctgttgaccaaatgcggcaaggctaaccgagaaaatcatctggttttaaaagataytcctaaaaaagttgagacagttgcaactaattcttggctgctgcaaagattcctgctgtggaggggacttgaagcagaacatgcccctcactgccctttgtggctgtaattccatcaagggattctggcagcatacacctcagacacagagaatgtttgacttcagagactcctaggtagactgtgaaacattttaggacacgttcgacatgaactccagctttataccctgtttacatttcagagtcatctattaaaggtgggtatgagataatcagtggatacagaaaatctagttctccaagacattaaaatattatgtgccaagacctagatccttctgctgaccaaaatatcgatggcgtgaaagaccgtgccccttgtatattttacacagaagtccatcatactgaaaagtttgttccttttttgcagtgatcacattggccacaagtcccccaacaggaagagttttgctaatggcaggcagcctttaatcttacatcacatagtctgattctgcccttaaggagtcacctgggccttggagaggaggccgtcttctcctttgttgcccaggactgagagacctgctagtgtatcctggcaactgttgtgctcacctcaaggatgacragtccctcagaactgtgacttttcttatgttgtccacatttcagaggcttctttttcacatgtgccagcaaatgactgcccacagcaagtctcttgttcttttgaggcagtgccactgagcctggagctgtgtgtctggagccttgcgtatccaaggagaaagcgcttgagtggccctgagtcagaaaaagcctttggcrttgcctctcccttttttgtaatagtgcctctttctccctggctgcggttcccttctcagcctcccctgtttggcatgcccattacacccctggcagggtgggcatctctcctctaaggggccacctttgggttcaaatcccagccccattgttatttacttacaatttgggacaagttacataacctccctgggtgtcattctcctcatccgtaaagctggtccaataacaataacaaccacaacaataatattactgcctagggtttgcttttaagaaacctcccacatgctgtccgacaaagtggatgccccgttgctcactgctgttgttctcaggaggctcacaagccatccagcccacccggctggtttttgttttaatcctcttgagatgctgtgagtgggcagcaccatttgggtgagtcatcactcctcattctaggtgggacggcactctaagcacattctgagaaagcaacctccgagcagtactcctcttgtcctggtagaaragaataggtctcatgatagctccttccgctgrgtgggttgtgtaatttgcaacaaggattctaaaaggaagtttaaatcaatcagaggctgtgtatgtggaaacagtgcgattcatgtgctgagatgtttttctacccaggaatagccattaggcactggctttttacgtaagaagcctttgtgagaaggtaaagcatgctcttgttccaaccccttgttagaacttaatctttttcttctccatgcctcacttccccgcccccacataatattcctcttttcattaatttttatggcaattcaacttaatatttccaaatatgcaaatattagaaataaaaatcaacataaaaatatttctatatgagtatgtacacacacacataaaaatatatagtgtaggcattactgagtgctacctgctttcagttgtaaacggacagacagacatatgtttatgccctgcaagaagctccatagcatcttctaaaatgttaatatcacttacaatgtgcttacttactcttagattttatttcttttttcattttcctgagaactgttccttgtagccaaaatgccaattactcactttaaatagagttctaatttcttgtaagtcacaaagaaaaaaaatatgcaatttttcctcttccttttccttcttgagagccaaaaaaggcgtgtctgtgccatttcttctcacgactaaataatrggccctcccacatcccaccagctctgaaccagtacactgaagaaagccactcttttgacattttcctgtgtacagggcaacatttctttatgcagttttattcacattaaccagtactattggccaccttctatgtgctggtcacttcgtggcccaargtaagacagagtctctgtcttctgtaatscaatcagaagggtcagaaaagcaagtttaccatatagtacaagtagaataggatgagttccataagaaaagataaaagcccatctggaaggagagagtaaggttactggtgagtaaaaggatgttgatatcaagttctgtaagagtcaggtaggaatggagtaaaaaacaygggtggaaaaattttcttaggccagaaggtagagctggttgttatttgtttttcacagaaggagaggcaaaggaataggctagctatcgtactgtgaaatgtttaaataggagcagagagaggtaaaggaggtgcctaccttgatcttggggaattcggacagaaggtattttgcacagaaggtgggagtggagatgaaatttgggacttgaggagagaacctttcttggtcagtgatgacatgtttgctcttggtttatctttcagtctttcaacacaccctgcatgtgttcagcagtctacattattgtttacttttaaagatcgttgagagaatagtgatttcatttttcattacctccctgctgagttttccttcactggcatctctggctttatgtttgagttaacctattctggatccggctgtcttctggtcactggtataaagtagaagtgagtggcaggttgttacagcaatagaatttgatagcagttggagatacctgtgggaattggtcatgagctcgaatagttagcaagctctttcttaggaaatttttacagtcatttaaaggcctttcttgcagtttttattctgacaatgagtcttttcatgaacgttcagattgtctgaagatgtcgcaaaattacaataagacagttgtaagaatgttccgtgattcccagagaactataacattgaatttcctattaaagtcgtgaataagaaagattttgcagagaccagattgtgaatgcaatctcttacacaaaagcattgggtgattcccttttgtctgtgacctccttcctaggtcattcagagcttcaaactcttgctctcagccatccaccttcatgccttgtttctttccttcctactccttacattctggccctagtgggtgactttttgtaaccagcacaaggcattcaccgtcacagccctggggcttcgctctgctttcccctcttgacagcacactttgaacctgattgtttatctggtaaagttcttctcaggctgarctcctcctctgtgaagacttccctacttctctcttccaagcagaattcactccctttctgagacaataccactaatataataggtttgggcttctatcaaggttgtctggttagtcatcagggagcacagagtatttctgagttatacatgcttttccctgttgctttgcacaccctttgttcatttgcatgctacagggcactgctgtgtgtgctcatacttgcttattcttttaggcatatgccatagtattgccctaagtgaagctgggactttaatagtgattctacaagactccatttaatacccaattggtggtctggatgaggctaaaaggaacaacgtttctggactttaagagactttcaaaataggaggggagagggcagtgggtctcataactttccaccctgctccaccatcagactgacacattgttttggccagcatttctcaatctgggtttgccaggaacctagattttcacaatacaaatgtctaggcttcagagcttctaattttgtaggtctggggatgataattaaggtatttcccaagcttggctggtgacttatacagtggactgagaagagttgatctcactgtggctttagccctggctgcacatttgaatcaccgagggaggttttccaaatattgaagcctagtttctacccgtaccatttagatcagattctcaaaaaccagaccactggtcttaggcttctctctgcttttcaccaaaaagcaagatgtagaaaagagcagtaaacagagaggggtgattrtattatgggaaaccacagagaagattcagtgtagtcctttttatggcggttatttttgtttctgttttctgattaggaaggagggatggaggataacaatatgaatgcctagaagctaaggacaaagccatttcaggtggaaggattcatacttacgaaggcatagaaatgagcgattacttttcctggtggaaagaccacatatgtggattcatgagggacacccttgcatgaaggacgacagggaggtggtgagtagggaaacccaacatctaggttgaagataatggatttcatgttggagagaataggtagttactttgtttctaagcaaggagtaattttagagataatattgagtttcagtaagatgtcttattgctatggttagggtgaactgaaataaatggtaacacagcagggttttgttcagggccaacttgtgtgataggtgtgacaaggtggctgctttctgttctgcatgtccaatttgataaaccaagatctaccatgggatttgggcaatccatagcttcctgccctctctctactcctgcttctcttgcccttctccacttccatatctctttctctgctaaatatgccattgtcctctatttagggtaaacatctaaaaataggtataaagaaatagaagaaaaataaaaaagtagcaatgatgggcactcacattataaaagatgtaaattgttttagggaagacagaattgtttaaagtatgtatttaaaagcagatatgtgttagatgtttttaaacattttttttaaccttgaaaggaaaagaaaataatgttaaaattttagatctataaaggatatgaatttatgcccaatattgttttaattcaattaggataattattttaaaactggaaaaaggaatcaatattgataatagcaaataatccaaaatcagaaagaatctattaaaaaaactactttctttgaagagtgaagttttctacattcaaataaattataccacagatagtaagagatcctataaatttggtcataggactatgggtcaataatgtctgagaaatagtagaaatgggagagtttctgaaaaattggtgctaagaaaatatccccattcaaaattgggcaagtggccaggcacagtggctcatgccttacaatctcagtgctttgggaggctgaggtgggaggataagttgaggccaggagtttgagaccaacctgggcaacatagtgagatcccatatctacaaataaatagataagtcagagatggtgatgtatgcctgtagtcctagctacttgaggcaccgaggtgggagcattgcttgagcctaggaatttgaggctgcagtgagctatgattgcaccactgcactccagcttgagtgacaaaaagagaccctgtctctaaaataaaaattaaaaaaaattgggtaggttaacttacagcttaataagtyaatggcaacctctacaaaattatcctaacagtaattaaacagatgttttatgtagaattagaaaagaaaatagtggtcataaagagctagcatgagttccttaaaaataaatgtgtattatgtgtctcatttcatttattggatggggttattatagtgatagctttggaaaattccatagacaacttgtgtctaaatttcagcaatgtatctgataatattttgtgatttccctgtggttaaggtagaaacatatagataggctaaaattaggccaaatcacaaatgttacatcccaccctactccaccctatgtgaatattataaattaattccaagctggagccaggtatctatttgagcaggggtcctgcagttggttctgtgctggttgctatgtttatcaatgacaggtgaatcatacatgaatgcttatcaacttatcaacttgctcttattctcctctgggaaagacagctgagacacatggtgatagaaatcagatttagatatccatagactggaacgatggtcccatatcaactaatataaagattataagtttagaaactgtggcaattagcctttcaccacttgtgctctagggtgttttgtctagatctttgttacttagaaattccaagctgaagctggctgaccatttttcaggattcttcgcagaacaagttgctaagtggcgaggaagcttgaatttgattatttgctaaccctgaaagtctattattctttggaattacttggagaaactgttttatgaaacatatcatcatctcaattgtctatcatacagctaactcacctatctcatccatcaaacttagtttcaaataacttgttgctgttggaataaaatgaaatctatcctcaaaatatgacgactattaacattcagaatcttccaaagagtgcctgcaggttcaggaggcatttccaaaagaggaatcttcaatgctttaaacaagatactggaatctcagttaaataccatttgctattgggagagatgtartgtgtattttctagggtgacagctttggacagcagcaatttgactgtgtaaaggcttacatatctttctattcctaattttataatgcttaaaatatttttattattgcacattcttgagatcattactagaatttgttgttaatatggcacactttcaattttgattagaacacaaaacatgaaatgttctaaatgtataattagaataaatctgatgcttggttaaaatatttttattgagaagagaatatatagtaggatacmacaaaatatttggaaattataaagggtaataacccaacaaatatctgagtattccctacccattttaataacaaagggtaccatcgtaataacctctgaagtctgttgcttattttccttaatctattcctgagcatccccaataagcttaaatttttcacttattgttcccttgctttttattaacatttaaccaaatatttgtatctttactaatgatagcagcataaaactttcatatagtgatttctatgtgccaagcacttaaatgccatacattcatttaactcaaaagcaatcctcagaagcaggtatccccagccaggcatggtggctcacgcctgtaatccccagcactttgggaggcagaggtgggcggatcacgagatcaagagattgagaccatcctggccaacgtggtgaaaccccgtctctactaaaaatacaaaaactagctgggtgtgttggtgggcgcctgtaatcccagctactcgggaggctgaggcaggagaatcgcttaaacccaggaggcgtaggttgcagtgagccgagattgcaccactgcactccagccaggtgacagagcgagactccgtcttaaaaaaaaaaaaaaaaaaaaaaaaaaaggttggtatccccattttacggatgaggaaatcaagatatatagagattaacccgaattccagttcaggcagtctgactgcaaattctgtgctcttcccctctgttccatgccccctgtcaagaatacatagtatagctctatttgcatttaaaatgttatgtaaatgaaatactactgtgtgcaatctgcaattaacacttttagtcaccactgtgttcttgagtttcatatgttttgttctatgcaactgtagttcatttattttcatttgtaaagagtattatttcattgtatgactatattgcaatgtatttatctgttctgctttcatctgacatttgagttgcctttatatttttctgtaataaatagtgctgatatgatattttaactatcatcttgtgtgtatataccagagattatctagggtgcatatcctggagtataattcctgtgtttatgtgcaccttcaatattcctatagaacagcaagctgttttccatagtgatgaaccatgttgtcctccttgtgacagtatgtaagctctatatcttgccaagaggtaatattgtcacactttaaaatttttgtcagtctgtttagtttaaagtggtagaggaatgatgaggaggaaagaagaaaagggggaggaggaggacggggatgaatttccagttatctgatggatctgaacatgtttttctttttttactrttaatatttggtttctccttttgtaaactacctgttcaaatctttggttcactttktgggggaggatgtttatctttttcttattagtatctattagttgtagaaaacatcttttattttgtggctaatctttttaccttcttcatggtgtttttgatgaacagaattatttaattcaattgaatttataaatattttccttctaggatttctagatttttgtgtgtgtgtgttctatttattaaatacttctgttcactttgattttaaaaagatactttcctgtattatcttctaaaacttacatagttttgtatttcacatttccatttttaatctacctgggatcaaatgtatatatgcttcgaggtataaatacaattttatttaatttttctataaggataagcaattattgtgggaacatttgttgtaaagtgtatcttttctcattattctgtaatgccagttctgtcataaatcaagtttctatgtattttttggtctgtttctgactgtctttgtttcattggtcagtttgtttatttctgtcttaataccacactgtattaattgttaatggattataacaggtcttgatatctgctaatgccttccctacttccaaatctttttcstagggagtcttaactccttttgttctttgttcttccttataaattttagaattagcttgtcaagttccctcaaaagcctgtgggacttttgattgaaattgtatggatccataaatcattcagggagaattgacatcttcaaaatattgagtcttccatggtatgaacacagctttccttttgtttgggttttaatgactttctaatatgtctttaaatattgtctgtacccaattctctcttcaattctctctgttctttttttgaatctctaataaacatgttagatttaccttttttctcttctctatgtctcttaatgctttaataatttatttagatctacattttaatttactattttttctgtttctgtctgctattataacccatttattaattttaatcatgattgtccttattaaaatttatttttgttctttttaaagtatttattcatttgtttatggtctcttctttagtcttagttttaaccccatcttttattttttagcattaatcataattattttatattctatttatgataatttcagttttctggagtttttgctggcttatactcattgattctttttcattctcctgtgtttgtgatttttgatgaggatttcatgtgtcttggtacttttctggaattctttgagacttgggtcttcagagaggatttgatttgcttcttggacatgcagggaaatttatgaagccataagtactttatactaagtatttggattgcagtctgttggataacctagagaacgaaggcatgtaagggctagtgtgtggtcagatatgttggaaagatgtttttccttccatcacttagtgccagtattcaagacgaacatttttcttgtagtctttaagatgagtggaatctttcagatttagtctttcatttttgctgacatcactttagacaatatgccagaagtgtttacatataaatgtatgtatactgttgactgtatgctgactgtatcctctctcctctccctacacacgaaactctgtgactcccagtacccagtggcccataagagmaagaggccctgaaatttaagcttccttagtttcataataaatccatctctgcttaagagtagatgttcattattttatcatatcaagtacactgaagctttaaaaacaaatatttttattatataaagtagtttatagtctcatatttcctgtaaaatgtagtcttctcttttacagttgaggaaaagaagggttggagcagcgaagtgacctgcccagagtcataaagttaatgcgttgaatctggttttctgtccagtccactttccactttacaatgccagtagttctctatttagttataatagatgcctttttcaaaacctttactgtgttttaggaaaaaggtacctttaatatgcttactgaattgcatcttcatggcttctactcgaggtcacttcaaatcctgtttctgtcacctcctcttagtagcctttccctatcaacatcattcccattttctaccacttattcccatcattccattcatagcagatctatatctattagcaataattcatgcatttgcttacttatgtattgtctggtttttcccctgagatcataagctaagcaagaagagggaccatgtgtattttgtttacttccatacaaacagcaattactttgagcctagaacatagtagaagctgaataaaaatattgaatgtctaaaagtctgattctaaaacccatttctttttgctaaatatatttattgaatcggatgtttcctgttatcttagaattacaaccaagttccaaagctgaactaagtatcctacattctaagttttgagagctgccagtggttaaggccagacatctactgggaggactgagatcagaaaattattcctccaaagctgtcacttccactcctgtaaattaatataaagcgagaatgggagagaagatattgcytttttggagtacaatgttaataaagcaagtttaattgcttcctttactctaaatctgccactaagagtagggcgagaggctcaaagagaatattaatccaagttatggttgtctcaaagaagacactacaggtattttaatctccattagaacatatgcttagccaggcttggcgacctggctatctggcagaagagaagaatctgtaaagagacatcttagtggggtactgccaggcaggaataggccacaagttggggtttacttcaagttctggttcgcagaaagtttggaagactgatgccatatctgctgtcaggctcagataattgaaaccttagggataggggtctagtcttgttagtatcctcacaatttggggagatttggaggcraaaaacaaaacaaaacaaaataattccctgtgtattagaagaatggatcatgacgctaccatcctggtattaactggaagatctaacaagatcttggtcaggatggttgtattagtctgttctcactttgctataaaaaaatacctgagactgggtaatttataaagaaaagaggctcaattgattcatggttctgcaggctgtacaggaagtaaagtggcttctgcttctgaggaggcctcaggaaacttataatcatagcagaaggtgaaggggaaacaggcacatcttatatgaccagagcaggaggaagaaaaagagggtggagaggtgctatgcacttttaaacaaccagttctcacaagaactcactgtcatgatgacagctccaagagggatagtattaacccatgagaaaccacccctgtgatccagtcacctcccaccaggccccacctccaacattgggaattacagttgaacatgagatttggatatgaacacagatccagacatatcaatggtcagtgctgggagagctgtgtgggtcaatggagckcactaaagctaccatcagtccaagacaataagctcaatgtgccctgatggcttgccaaggccagcgatgctaccaacgttatccaatcagttgaggacactgccttttccttctccttccttcttccaaaatgctagaggaatccgcataggtgaatagaggtacttacgataagcagaccaccccactccctaattcaaagccatttgtaccacaggtctaagggaggagtggtggcatttagaattagaaatgaaaaatgaaatgaacaagatcaaaatgaacaagattgaccagyggaaatcaaatgagactgttaggggagactgttaggaaggatagatttaacatgtcacgactggggaaatagctgttggaaaataaagctctttctcattcataatcagtgaagttgagagtccacattaaactattgaaatagttccctctggaaggtcaataacctaggactggttcttaggagagaattatttaaaataagggtgtttcggcggggtgtggtggctcacgcctgtaatcccagcactatgggaggccgaggtgggtggatcacgaggtcaggagatcgagaccattctggctaacatggtgaaaccccgtctctactaaaaatacaaaaaagtagccaggtatggtggcatgcgcctgtagtcccagctcctcaggaggctgaggcagaagaatcgcttgaacccgggaggcggaggttgcagtgatccaaaattgcaccattgcactccagcctaggctacacagcgagactgtgtctcaaaaaaaaaaataaaaataaaaataaaaaataaaaaatagataaataaaatgaaataaaatgaaataaaataaaatgaaataaaataaaataaaataaaataaaataaaataaggatgttttggtacttcagtataccacccagtctttgatttcctcttcaaggtaaacactgtggtataagacctaacattttgttttaactggaactaaaggccaaacttcatattttcccttggtggtctgcatatttcatctgtgtagctattttaatgtacctagagaacaaggaaaaggaaatacatcaaaagttacagaaaagaggagaccccagtggtttgtatctttgggtaaaaaggccctgtaagggggcattgataaattgtggtataaacaaaccttgatcctggcaatatagtagccaggatctttaaaaaagataaatatttaaatatttatctttaaattatcytttaaattatctttaaaaaagataaatatttctgaatatttgctaatctgggtggtgattccactattaaaattagcatagacctgagttttaatagactagcatgcttggtgcctagtaggaatgcaataaaaattagcttaaaaagatgagtttccaaatgattgttttgtgggctcataaataaagatgcttttaagtgttttattgttttcctcctgaccctctctcagggttatatctttactgcatgttccatatttaatttcatgatcacattgaatatcagagaaataagaaacaagttatgttcatggatactgacctccattgtttaataataatagctatcatttcaataaatatttattatttgtctattaatttacatgcctttttcttttttgtaatttttattaaggtatrtttaaatgcaagttatgagttttgcaaatgtgtacagttgtataatctatatatttattaagatatcaaacatttgcatcactccagagagttaacttgtgtgccttcccaatcagccatctcccctccactcagcaaccactgttctgatttctactgcaataggttagtttttcctgttctataactttatgtataatacatatacaatatgttctttctgtgtcccattttttttcactcagaataacgtttctgagattcattcatgttgttggaagtatctgtagttcattcttttttattcctgagtagtatttcactttataaatataccatagtttctttaatccattctcctattgctggacagttgaattgttttctttttctttactaatatgaataaagctgctatgaatatttatatataattttttatatctaggagtgaaatttctgggtcatattgcatatttatgtttaagtgcattaaaaactgtctaatagttgtcaaagtgatttactattttattcttccagcaacaatatatgagagttcttgttgttccacattcttgccaacatttagtgttctctrtctttttattttagtgaaatgaaatcacatttcattttggatttactttacattacccagatagctaaagtattgagcatttttttctgggcttattgggcatatttatctttcttttgtgaagcatccacatagaatttctttcttcatttttgattgatagtcatgctggatataaaattcttggttgacagttactgtttttatttcctttcagcacatataacatatcgtctcactgccttctttctggtctccatattttctgaagaaaccatccattagtatgaaggatgccttgcatgtgatgatttattttcctctagctgctttcaagatactctctttatcttttacttttgacattttgactatgatgtttctagatgtgaaggtctttgagtttatcttagagtttattgagcctgttgaatgtatagattaatatttttcttccccctcaagattgggaattttctgtcatttctttaaatattctttttgcccccttttctcttcctttttcttctggaatatctattatgaatatgctggtatgcttgacggtctgccacaggtctctgaagatctgtttttttcttcatccccttttttttcctgtctctctaattgaacaattacaattcacctatcttcaagctcactgattccttcaactatcagcttcaatctgctgtccagcacctgtagtgaatttttacttcagttttgatatttttaacttcagaatttctatttggctccttttcaatattgtctgtctctttattgatattctctatttgataagacattgctctcatagtatcctttagctccttagacatggtttattttaattatttaaatatttttaatataggtgctgttatttatttatttccccaggctggagtgcagtggcacaatcttggctcactgcaacctccgcctgctgggttcaagtgattctcctgcctcagcctcctgagtagctggaactgcaggtatgtgctgccacactcagctaatttttgtacttttagtagagacggggtttcaacatgttggccaggctggtcacaaactcctgacctcaaatgatctgcctgccttagcctcccaaagtgctggggttacaggtgtgagcgactgtgcctggcctgcaatttttaaaaaatgtctgatcttctccaaaaaaatttttattgacttgctcatttcctgtgtatgcgtgatactttcttgtttctttgcatatctcataaaattttatttaaaacaggaccttttaaataatacaatgtgacaactctggaaatcagatcttctctcacttctctccagtgtttgtttatgttgctgattgtagtattgtcattgctgcttgtttgttgactaattctgtaaagtctattttctatgttgtgtatgactactgaagtctctggttagcttagtggccatctaatgatctaattattggacagatactttcttaaatacctgagtacagtaagtgtccccaattttttcaagtggctctgtatgaattgtggggcatgtcttcaacactcaggaatgtgtaagatggtttacaactttgcattggccatcacttcctgtttgtgtaatgcctcccttttagccagaagtgggacattagggccttctcagatttttcctgagcatgtgtacagtcttatacatggtttggatttgtgtccccacccaaatctcatgtcacattggaggaggggcctggtggaaggtgattggatcacgtgggtggatttcctctttgctgttctcgtgatagtgagtgagttctcatgagatctgatggtttaaaagtgtatggcacttcccccttctccctctctctcctgctgctatgtgaagaaagtgcttgttttcccttccgccgtgatcgtaagtttccggagaccttccagtcatgcttcctgttaaacctgcagaactgtgagtcaattaaacctcttttttttcataaattacccactctcaggtagttctttatagcagtgtgagaacagtcttccacctgtgcatggtcttctaaatttttaggaatacgttgaagctttctgaaacaacatatgtgtacagcttaattccagtttttccttttaagatttttgcttagtttcttatttgccccagttgttatcatcatcttaggccactatggtgttaaaaattcataactgattgttttcaacaaatgccgctggtgaaagtgctgagtggagtctgagccaggttgaagaaaaacaagccatggaatgggggttttcagagaatgtcagacatggcacattacgacagttgtctgarcatagttttttgggaagctccaaatgtattttgccctttccagtggctgctaggctgctggtttttactgggatcaaggagctgttggttttcagtgctactatggagctgagagataaggatggggatagggcaacttaaaatgccacaaaaatcactgttcttattgaggtttagttatttttcgtgaccaaatgcttctcagattgttgcaggatttcttgaaaaataatctcaagagttctgaggaaaatgattttgcccattattgccgttgtttttactgcttttgtggaggagcagctttccaggggtatggctctgctattcctgctagaagcacagaaataggaaggaggtgctgagtaagtagaagtattgcttgacatgtcttttacttcttttgataagtagatgttaattttgatgtagttgaattcatgaatttcttcttttatggttagaagtttctgcatcctatcttgaaaaaaatcattgccaactccaaggtcattcagttttttaaaatgctttcttttagaagctttatagttttaacttttaggtttctatctgtgatccttcttgatgtattatctgtataatgtgagatagggtcaatattattttttcccatgtgaataacctttttttcctagcatcttgtcttgaaaagaccttctctccattggattgtttcaatacctctgttgaagctgtacatgtgggggttatatttgaatctctgttcttttcaattgatcaaatgtcaattctttctttaatagcacatgttctggatttctatagctttataatacgtctagaaattgggtagtgaaagtcttccctccaactttttcttttttatcgaggttatttggctattttatgttttttttattgctatatacattttttaaatcacctggatttggatagagattgtgttgattttaagtatcagtttgggaagttttgatatcttaatgttagtagtactgatctttcaatacacaaatatggtatgtttatttacatctttaatttttatcagtgatgttttatagttttcagtgtaaggtcttacaaatattttattgtatctgtcctttaataatgcatgttttttagtgctattgttaacagtatttttaaatttttattttttaatttgtggttgcatatatacagaaatacagttgacttttgtatatagtgtctgtacactatgactccaaacttactcattctgtagaatgagttgatttttgcagattagttggaatttcaagtaatcatgacatttgcaaatgaagataattttactttttccttcccaatatgtatgcctttattattattatwaactttattttccctctctttttacactggctagaacttccattacaatgttgaataaaagtggtgagggcagactcccagatttgtttgaatgttagggagatgatactcagttctgtaccattatgtatgatgttacttatagatttttcatatgtattctttatcagactgaggactttttttttcctcatcaattttttttttctgcaagtaggcctgcaggatacatgtgaagtattagagtctagttaatgatgagttagttgctagtgaggtaggggaaattaaaagaacaagtatatctgcaggccgaactggataggatgaacaaaggccatatgataggaatatagacaagctgggctggatgaagaaacctgacttctctttgtggctctgccaccaacttcctattaaaccttaaagaaggcactttattttatttatttatttatttatttatttatttgagacggagcttcgctcttgtcgcccaggctggagtgcagtggcgccatctcagctcactccaacttctgcctcccaggttcaagcaattctcctgcctcagcctcccaagtagctgggattataggctcccgccaccatgcctggctagtttttgtatttttagtagagaagaggtttcaccatgttggccaggctggtctcaaactcctgaactcaggtgatccacctgccttggcctcccaaagtgctgggattacaggcataagccactgcgctctgccatggcactttattttttacctagcactaaaagatatagctgagagccaggttggtatcagaaagaatttggtagagttgcaaaagtgattttaaaatttgaaaaataagaaatgtgagaagagattgataaggctagacttcctttatctgctatgaaaaaggctgagatttaaattttttgatactactttcagttcactgcaccaagacaaccattcatctgtctctgggtaccttcacatcccttttctccaaaaccacacgcycttggtttctttagctatattgcaggtcttgagatcaggtaatgctgtgttccccagctctacttttaagtaattattttgctaaagtatcttcacctgaatcatctgggatgacttctgtttccttccaggaccttcacctcactgatacaactggcactgatacaccctggcagtgtgtctcctcaacacataggtgtgctctggggtctttgtaggcttaaccattgtgcctaggcctgacatcgaagtaggtagttaggtctttgcctgtcaccacagacatcccattatatctatggcactctgaattacagcttaggaaaataattttaactactttgaatgtcatttgactccattccttagggtcatgcaggattttttcatttttatgagtcccttctgagaacacagatagccttatgagggacagttgccttcagttgacagccttgtgtgggggttgtctagtcagcgataccatcagttttgcaagactgtggttgtgacagtataggcgtccaggtgaaattgaagggggaagggaccaagtgtgctagcatcgaaatggggagtgggatgctaatgatacacttttcttgttgtcagttttactgggaacagccctgtggaaatttaaatcctttcccctaaaatttctttgaagtcccaaaaggcttatgttcttaaggttatttctgttcccaggctaatgcttttcctaaatttgttcaattctggattatctttttatctcagtaggcaaaatctattctgtattcattgacctggatataaaattcagccccttctccaatttccatattcattagacctcactgcctttaaggcaaaaagtagacttccctgaaggtacaagtccaggtgggaaatatggaggagacaaaggaggcatttccatgacagtgtgcaacaacttccaattgagcattagactgtgttcttaacatgctctttatttaccccataccagggcatttgcctgtatgtttatgccccctctcaatcctaaaatcctaacccccaaggtgatggtatcaggaagtggggccttttgagaggtgaataggtcatgagggtggagtctgcatgagtgggattagtgtccctttaaaagagacctaagcaagcacatttgcctcttcctccatgtgaagatccagtgaaatgacaccttctatgaccaggaagtagaccctcaccggacattgaatctgctggcaccttgatcttgggttctccaacctccagaactgtgagaaataaatgtctgttgttcataagcctcccagtttatggtgctttgttagagcagcccaaacagactaagatagcatttcatggacagcatttagtccattgcatgccctggtattataccatcttgtggatccttcccttcctttctattgtgtggcccttctctctcccttcctttcagagcraatacagagtgagagagcctttggagccagacatctgggctccagtcttggttttatcactgattcactgtatggcttacctaaattacttaaactttctaatatcaatcgtcccattcataaaatgggcatagcaaaacgatccatttcataaacttgctatgcatatttgaggtgtgctgtggtttgctgcccacagggcttctcagaaccaaggtactcatttcaccgctgctgggagtgttggctgctgctggtccacatctgagccccttccsaggtattgtctctgacacaagaagatctctgccatggttatactctccccaggggctgcctgtactcaaagactggttgatgtaaagtttgagagtcttgttcttttaccttaaattggggcaatccagctccagaacttcttgtgaggccaactgaggcttccgttacaactatctcatagtccagcttctcactctgctaatcctgcctcctttaatccctgacaagcattcttcagtaaacctcttgaaaacttctgtctgagagtctgtttccaatcagaaagaaagtgggtaaaagaatttccaatgcatactgggtacccaagaaattattattattgctttgaaggtaagataatttatttcaaggtattttccaggatatggatctatctatatatctatctatctggagatatatatatatatatatttggagttatatctatatctatatctatmtmtatctggagttatatatatctctctatatagatatctgtctggagatatatatagatatctatatatatctgtatctatctatctgtctgtttatctatctatagctatctatctggagatctggagagatatctatatatatatagctatctccagatagatagatagatagctatatatacatatagatatagatatataaagctacataaggaattctaattaatagtttgaaccatgagtagtgagaataaaattattctaaattttgacaagggaaattgttattgttttattttttaagatgttattttactggagcatattctaattagtctcctccaataaaagcagaatctttttatttagtaattgactctcatctgatactcttgggtactataattttgttgtttctgtatatttgagtattatcaataatccaaaactgatagaggtgctgatagtttatatttctggaaggctagaagataacctgtgaaaagctgatgttttatgattttatagaccgaaagagaagttaatgccacagaggttaagatcttattcactgatagagtgtaaactactcttatatctaatttagcagtctttttaggcatttctttcccgacttttatcaatctcaatttcttatttatactttgactttgcatttgtcttctctacttgttactttactagtgagttaaataaaacttggtcagatgctcactactatgtataagagaatgatgtttttcatgggaatgtgtttctgtttaagtattattagtttataaagggtagcattattatgggaaggcatccaaggtttcatgggggcaactggaaaagagaagtcagcattttgaagttagccaaaccctatcatgctaaattcaaactttgggtgtggttttgaagtatgtgtatttgctagggttgccataacaaagtaccacacattgagtggtttaaacaaccaaaatgtattgtctcacagttctggaggctgaaagtctatgatcaaaatgtcggcagggttggttctctctgagggctgtgagggagaatctctcccctagctgctggtggttgctggcaatcttcagtgttccttggctcatagaaccatcacccagatctctgccttcatcttcacatggctttctccctatgtgtgtgtctgggtccaaatctcccctttttataaagacacagtcatattaggttaggggcctgtcctaatgacctcagcttaacttgatgacctctgtaaagaccctatcttaaaatacggttaccttctgaggtactaggaattgggacttcaacatgggaactttggggtgacacagttcagcccataacagcatgattattttttctccattctcaaggattactttttccctcaagtgataccataaggagaagaatgtcattaactctggagagaatctcagtgaagtcatcttaccatgttttaaaatgaggtttgttgccacatcccacgccaagcccgtaccagtgttgccttatggatgtggttaggaaagttacacttgggaattaaatcctgtctgagaaatgagttcacaagttctcaggggcattyagctgccaggccatttttacacattaagcaaaaaaaaaaaaaaaaaaaaaaaaaaaaaaaagtcttttgggcattgcatttatttacatgaatataataaatacttccaatggcatttggattgcacatttgcatgtgtttaatatgatggtaaatctgtctgaggaaagtgtgcggtgctttctgattttgtattaggaagatgggttaggcagggaagaagaatgattcctttggcaaccgtggaattatttactgactagaagaggaaatcttctgtttgaataacccctttgaactgcctgacacgtggtggaagyttgtcaaatgtttgttgaatgaacagaagtgtccagggaacttagactgttttgagagcaatcaaaaagcacatatttattcagagatttaccatgtacctagctttggctggtgctgtgggggcccgctgatgtgtgtacgaacaataatagcagcaactatcgattgtgcttactctgtgccaagcatcctgcccaatttttttccactattctctgagttaggcgctatttttattttacgtataaggaaactgaggctaaaagacatcaagctatctgactacataaccattaattggtaaggtaaggtgtgtgcttaacttctgcactccagtgcctagtaaacatgtcctcttgctggtagaagtttgcattcttgttctagagacaggaaatttataattaaggcaattagagaagtagtatagaaaaggtgaattttatagtacgtctggtttgctatgtatatgtgtactgtcagcattttataaaagtgtcaggttgtgaaatggttaagtatataccttctggagttagatgcctccattcaaatcttactcggacctcttcttacctgtgtgttgttagacatggagcttacgtgttctccataagctccatggagaacatctattataaaaaaatgggaaatttattatgaaatagggatcataccttattattgtgagggatacgtaaaatatgtaaaaagattcagtgcctggcaaaatgtattttctgttcaaatgtaagcttctcaaaggcagcagtgattggggtctgttttatttgttcttgtaacctacacatttagaacagtgcttggcataaaatagacattcggtaaatacattgttgaatggatatatttcaatatgtaaaggcctgggcttagtcacattacagacaatgaagtagtcagatgtttgcacatctgtgtggaacagtggttcctagccaggatacacattagaaatacctggagggctttgaatggactcattcttaaaccccatggtaggcaaaggttgagtaccaatgttggagaatcactgtgaaggtaacaaacgtagaataatagttgtatattatgttgaagattcaataccaaaagtgattttttgagtgactcaatgggatgagtttcttaggaaacaaaacacaacctttggttcaatagtaattacatctttcaacatttcaatgtacattaaaataatcaaaaagtactttgagttcatatataatatgaagtaggatttaggctcaaataattacgcacagtttgttccctgacataaatcagaggtgaagtttgtgcggggcttgggacaatttttttattgcgtggactatcctttacattgtaggcagcttgtctaagtcagccaaaaagcactgtgagctgctttgaagacaagcaaagttagtgcccatatggtataagaaaaaagacaacaacacactaggtgattaagaactctcttggggaatcaaaccaagacactgagtaacttcttagacagctggttccttttctagaacaacaggatgagttcaccagtctctaatgtgtcaatctttaggaggtgttctgggtaagagacttcctgattctctggtgcttttctgctctgcaagaagaatcctgattctgttctcacgtgcagcatcacccagagagggagctggcaagatgaggatagatagaaaacgggagccacataaacctacaatcagactgaaactggaaccagaggaaattgagagaaatttgcaaagtgggtaattagaaaagggtatctctggcttatttgcatgttttccataaattttttttttttttttttgagacggagtctcgctgtcrcccaggctggagtgcagtggcacgatctccgctcactgcaggctccgccccctggggttcatgccattctctttcctcagcctcctaagtagctgggactacaggcgcccgccacctcgcccggctaattttttgtatttttagtagagatggggtttcaccgtgttagccaggatggtctcaatctcctgaccttgtgatctgcccgcctcggcctcccaaagtgctgggattacaggcgtgagccaccgtgcccggccttccataaatttttaaatttctatttatgaagagtatatgccacatgtttcattaaacacattgtaaaaatattaacactatcatatgccctttacgaatgtggcaaagggattccattttaatgttgaccacacaaagccgttttgatgtttcttaggcttcttaacactggattctaccttatttgcatttatttttaaagagctgctatgaaggatttctgactctctcaggcaagaatatcactgaaatgtaaggcatgggatataattcaaatcatcctaatcagatttctcaacccttgatctaatcagcaagctgtttttcttagcttcttggtcaagttcattcattaactcagaaagcatttcttgaatatagactgtgtctaccccagggctggaatgtaattaagattagtagatggattgagccctgtcctttaggagtttatagtcttattgaatgaagtgaagaaaataatatgatgctacttaaaatgtataatggcttttatattttaaatatrttagaggtctttcaggtaattgatattaactgtgatgttgtattattgaaactgcattataggatattttcttttcatatctatttcacagttaatatcacagttcttttcaaagaagcatttgtgattatagccatcycctatgaagcgttgttgtgaaattaatagaaagaatcattggcatttcatggttttgctgaccgtgggcttgagaggattctgagcagaaggaaagaacaagttgaaaccccattgatttttttttaataggagcaaattgcagcataaaactactgccccctcatcccactcccaaccacacaccaagttctactagactcttaaattcgtcatctaccagcaagataaattcaaatagaaaaataactttcgctaacttatatttgaggtctgagatataataaaactattttcttattttggaagaaaatgtgtatgcatgtatgaattattggagaaaaggattttctcccatggttatttaaaagaatggaaagttctaatcagaagttatttcgtacaccctgttgtacctaaatatattttttctatttgtatgtccttttgtgagggcaattagagttacaaactggcagccactttcatgttttttacttatttttttctcctaattaatgtttatgtgtgtagacataaaaccaaccttaaatttgtatccacaaagagaaataagtgatcaacaaaaaggccttacttgtttctattcccaggctagaaaagagtgtgatttgactgtaatttctttcagggttaaatgtttgtatgtctctttatcatatagccacattatctttcatagacacacgtggcttgcatccttgaatcctaatttgattatttcagcaattggctcctcctggcagtcctaattaggaagagtaaccgggttttggcggtcagagtctacaagttctgatgagttaaactcatttgccctgtggtttctactggtgcctgacagtagcgttttgtttcctctcttaaaaaaatttttttgtatcaaaactgtctgggacagttaatgaaaaaatgaaagatctgtgtttttctcattaaaccaagatttagaaattcttcagccattctaagagtttgcacttgggtgtggtttggtattttttgtaaggacacttaatttaggttgtggtgactgttaaggaatcaaatgtagaacctgtgtattctgactcttcagagatctgattttcttatgaggaaaactgtagctcagagtccccatacagagcccttcaaagccagagaaaatcctaataaaaatgctaaagaagttccttcaacataggtggaggaaaactgttttgagatgaaagatcmctgtataagattcttccactgttactttcttattgctcgatgatatggaatatgctttggggtgaggggccaaaattgatgttgctaattatttgccttggtgaaagtgaggaacgagaatattgtgtcatcattaaaggcctccatcttcataatgaccctttcggggattatataaagcaagtaaattgtctgttacccagtgggagcttttgaaagtaggctaccagcaagctcgatgtgatcgcttctaactactgaagacctacccmctatatctgggacttcctgtataggaatacaagagrcttaaaaaaaaaaaaaaaaaaaaaaacccaaaggtctagacacttgctgagctctctgacatacttggtaattgattaatggttgcacaatcctggattcttactggcttctactcagtgtttcctcaggcttgggggctactgttcatcttgctcaactttacaaattattttttggagggagtttgcagaggtcgctgagcaggatgaaaagattacctgcccttcagggttcaagaaagcttttaaattctgttcctattccttcccgtttatatggggcaagtttcttttcctttggggactcatttgtgatgggagtcaccacagatctggccatcactgctttccttttctccattccactgtctggagctttgttcctctgtgtagtccaaggggttgagaagtctgaggatctgggcctttctggggatccagggtatctgcaggcctcatctcagagatggcagattcttactgcagtgttcaggtcatatgagattagctgaagacagccaaatgaagataaagtaaataatgcaattgctgatgttttctttagagctccccttgatgggctttggaaagttgtggtcccagctgcttaaatgtacatgctcccacagagcaaagtctaagaactttagtgcacagaagagaaccttaggagtgtgtgtaaatgcagcttcctgtgcctcaccctccaactgattcaggactcagagttgcagcatcacaagaccctcctgattctatttcaggtacttctcagaccacacttagatattattataggggaaaagcccctctcccttctagggagtgacttarttcaatcacaaatcagcgctcatgtttaagctctagacccttgtgagacattttttgggaggccattcagaaattgaacttccacggttcctgatgatcccacagatctccctaggtgatctctgctttttttttcttcttcttgctgttcttattctcaccactatgctctaaccgttcttcccttccctttgctcagcaatgatcatatttgctttgctaaagtagcccctcttgtttcatttctttgcagaccaagatcagggctgactatctcaacctctcccaattcataccctcctttctgacgtgaattctgttrtgttccactcaacaaatctaaaatctaattagtgtttttaggctttatcttactgtgggtcttggtaagttattgaatgtgcaatttcttggcagatgcaaagcagtcttttcccatttagaacctcaaactcatgtagtcctctgcaggggtaaggaggatagggaaaggatgatattctcgagaggaaagcaaaataacagtgaactttcagctgtaaccagcttggagaatgctttgctggaaaatggaggaatttcagtaggagacctcatgagcccatttttcttgcttttagtcgctggcaatcttaaagttgttcaagtatggtggctgcccaaaccctaggtctttttccataaatgaagagtcaagacctttgctctttccctctactctgaatagaggattatattttaatttttggttctgaagcactatttccccacagtggtccccttgacctccctgtcttttgggacctgccaccctctttggacaccatgcactttagagaggtatattccaatactttggtaaagattttcagatgtggaagaggctaactcaggcattgtttctaccccatgggaaattttgagctctgtatgagattctgatgttggtttttctttgtttttgtttttgtttttcttcttgctgcaggaaagcaatctcccgggcaggcctccagcatctggctcctgcacatcccctcagccttcctgtggcaaatggtccagccaaggagcccagagcgactttggactggagtgtaggtgttggccttttcatttaaacatcacttcagtgcatgttttgtgtctctcattctcaggrttcctctagttacaaggaagacttgcttaataattttcaacattgcctgctgacctgtcctcagataccttagctgtagctccattttcaaactcctatgaacatcactcctttatatgaagtcagatgtgttcaagactaagataaaagcttcctgaatcatttgaagtattactgcagctgtaagattaaaaagtacctcgtgcgcagtctttattggtttctgccaagttgacgatgaattgagcttacccttagtgcaacatctcgcaatctaagttttgatttcctcagcttgagctgagtttttctgggtgctttttttcccagaggattacaggcacttcatgtcattctattgcttttccttcctcccttaaccaaaggcagatgggtctggcatcagtaggttgggtatatgagctgatgttaacattttaaccataacacactcacaaaaactattaacttgacttgaagattatagtctgaaactctttagttgattaaacacatttattgagagtcttcagtgagtcgagttcttggccgagtaactgtttctaactgtagacccaaaggctttgtcccttcctgaagcaatatgaggaaaaggtatcaagggagagaagggcttccctgaagttctgccagscttccctgatgatgaaccttgtttagcacttttagttgagtctgaatagaagggataatccatgttctttttctccatatgaaagagaaaggtggggtgggggaaaggtaacccatgccatgatttgatatcctctgtattatagcatttcttcctctcctctcagcacacacttattaatatccttattttacatcttggatgcataccaatgtaaatgctgcccacatttatgaagtgcctggcaaaagactggatgtgcttgaactacagcttctcccttggtggagatattgttaccctgagagtgttcagatgctgcctgagcctgttgaattggtgtatagaaagaatattcctttcctggagtttacttctttattccaggacagctatttaataaactcttaacccacaatagagtatatttgcaccagtgtttgcataattaaaaacaattaaatgcataaacataaataaaacctaagagaggtatgcatggagcaatgatgagagtgtattatgtatcaaggaaccgaaagagttggtttgatattcacgatgttccaaacaaccctgtagtctgcagcagcagggccttctttgaggtgagacattccaggggtagtttaatcatttagaggcgaacattcattaaatcccttctctgcccttttgtgtgacattaggtaagtcactgatttctttcagcttcaacgtcctcatctgtagatggggataatcatggccctatttcatggacattgttaggatcgaatgtgacaataagtgaaaaagttttttttgtaaactgtgcagccagcagatttatttgttaaagtaattgatgaattcattaattcatcaaacatttgttgagttcctgctttgtactagaatctatattggttacttgggattctgaggtgaagaagatacggtttctgccttcaagggtcttagaatcctgtgggcagaaaggaaatcaacacgaaaatacagggaaatgaggacgtcactggaatgcaacaaaaggacattccattcccatttgatgttggaaatagttatcagaaaatgctttttaaaagaagtgtcctgcctgagccagagcttggcacaaggtattattttctgattcctatagagaggtatgtactctaatatttcatcaaaatggtatttttggccagtggtgggaggctgcagtacagaatgagggaaaaacaaataggaatgaaggctgggtttgtgcctagtgatcttttatccctccctcttctccccttttctttgattttaggtaccccatcttggaggtctgttgaaagtatggcatgacacgaaacacttagctgacatctaacaatggtgggaaaaccgaaagcccttccttgagacagtccatctgagggcttagagatctgatgtgtaaggagttatgagatgttactctggaaaaaaaccaacatctttgtgggctgattttggtgtcagcaaacagaaagcaaaccgtgaccaacacactacactcatttattacaatcgtgtaaagcatttgtttcagaaaagaggaaaaagccgattgttaaaaatatttcagtgactttttctttggctaaaactagattacttgtattactttagtatgctcttctgttcaaggagccagccagggatttctttgttctgtttaaggtgcaaaaacagtcacctctctgtgccattccctctcctccactctcttgtttgattccctcatcttctaccattagtctactctkctggactcaatgtatggaaatgagcaatctttatttaattcagtattactatttattgagcaatgaaaagggttggagcctctttgattctttcaaataaaaaggaaggtggcaggagcttataaaaaaggtagggggaactccagtctcttgcctttgataaggtagagggccccaatagtgctaagttgtgcttctgaaggtcttgaccacagtggcagatggggtccagcagggacgacgagggtcctgttgttccctttccccacttgactcttgggtggaaattctctctgctctgtaacrctttggctcaggggaatcaatgggggtcatctcaaaggcgtctactactatgattctctggcttctgttactctattcttcttccttcatctgtaaggaaaaagattaaaaaaaacgttcatggtgtgtctgaagttgcaaagtcagagtgaacctggagttaggatcttagtccccaagtttctacttattgtggaatcccaaaagggccgtgttctgacactagcctatgtgccaaagtcatctgaagggacacaagtatttcctaaatatactttggcaaaaggctttgaggagaagtctgtttgtggggtgcctgagatacaggtgagcactgatttagtgcgcatagactataggcacctgcacttcttggccaggagggtgcygttatagcagacagtttttatgctttgggtacattaacttaatacttctctttaagcattccatttttatgttctcatttccttgtttgtgatatatacagtctctctctcttagttttaggttgtttctcaaaatcccaaacattctctcctgctgtgttttactcaaatggcttattatgacttttaggattctctgtcccacatgggctcattctttgaagatttttcggcaatagatatttactgaggctgcctgtgcacagtcattttcctccgtgcatgtcagggatagaacctgcagtggtgtgtggagagtatctggatcagtcttcagtatgatgcctgagtcttctattgacagcagtggacactgggctctacccagtatgaaaattatttcctctagagattttctcttttgctgtctgccaagccatgctcatcttttcaatcaaactgattctatgtatctgatgtagtctttgctttgtatcctcacaacacctctctgttggtagtgcattgtcttacaaaccttagaaccaaattagtgctttttgtttgactttcttatttgtggctgtcagatttcaggctgcttaaaaggaggggcaatgttttctgcttgttttctcttcacagtggagagtgcagcatcatagacctagtagctgcttggttactgatgtcaggggatgaattgattacagtttttctgctcaatcagtgagaaggggatatttcgctgggagttgacaggcactcagataatctctagttcctgaaaggcttggtaggcatgactccaaagtctgcttgaaaaataaatggatttatgccgttttaatcccaagtaactgtctttaaayttccttcctaattcaatgcattgtgttagattttaaggcgcacacagtactttggccttcctactcttcacaaggacatcatcttttcacttccacagtgacagcctgcagcagctgccccctctgacactggatgatgcctgtcagccaagccagttggggtaaaacaagttaaattactagaaaggaaggaagtaatgcctaagaaggaaaaaatattctcatctcctgggatggattccaagttcccagtttagagtgaattagtccatttagaagcatgtctgttccacagataatgtgtatcttcttttaaatgtcacatgtctcccttccaatggagacttcatttggacttccagcactcttccctgtttgtagtactgcagcagagagcccaggaagtgtgtctcccatctgtccccaccatttcataatttgtttttgcccattacactgcctaaaacaaccccctgaacagtggtggaaaagccaccaagatctttcttaaagggcacattggttttaaacccagcacccttgattttattttgttttccttcctcattggcaaactttcttcggtcccaagagctgtggaaaacagagcctcaacacaaacaaagccagatcttcagtccgaaccacctttcctttcctttcctttagttgacgatgctaagaaacactttctctgaggcagatagaaacatcacacagttggtgcactgcctcacagtttggttcagggacaagattaaggaaccagagtcttcatgtgggattggtttaaactgggttatgaaactaggtcatcttatctttagaaaccttgaatgaaaagccagaaggaggcagggctgtgtgtgtgcatgcgtgtttgtgcgtgcgtgctcgtccgtgtgcatgttctcatttcagtcctgtttcctgtgagtcctaggagacctggaccttaattttgggcgtcaggcccccctcttcatcaggtctgagtgtcatcacccacagccccacatctttccccactcccagccccatttcgaaaaactgaagtcagattaatcgataaatgagactgtttgttgagcagcgcataaggaactactcactataaatcagtgaagatcccagtcctggtcagccacgtaaatgaagggacaaatcgaccttaatttcagggactctcaccattcctttattttctgagaacgggggagtttttaaatcaaatcaccctggctgccgagggaaatcatggaattctgtaacttcacagacctgtgagaagtgtctcggtctaatcttctgccccgaggcaagtgattatctaaacaaacgctgtccagtagaaatagatatgagctgtaatgatacattttctagtagccacactttaaaaagtgagaagaaataggtaagattatttttaattccatattttgtttaagcaaatatattcaaaatattatttcaacatgtaatcaacataaaaattattagggagatgttttacattcttttctcacactaaatcttcaaaatctgctgtgaattgttcaaagagaagcacatctcagttagtgctaaccacattttaagtcctcagtagccatctgcgtattgtacagcacaaatctaaaacatccaacatggtgtgttatcaattcttgtcctgaagattttcaaggggaggcaatccactctttttcctttttgattttgtaaggacatttacataggatacatatttataattctcattgtttcaaaacatttttataagcaagcgtcttcattttgtgtggagtatttgcttcttgtgtgagcatactctttatctgtgttattcagtctcaaacactcacctcacctttgtctttttgcctgtaaccattactagaatttcggtagcacttgagcaagaaaacatgcctatatctagaaatctgtatttatgtctatttaggtgaatctccactcttagatgaatagatctatcgatgtaaatctatcaatgtaaatatatatatagctatacagacttgtgagtctcagcactcacaagtacagaagaagtgctatctttgtttagaaataggagagttatttttctgtctggcacagatggakactctttgagttgtatactatttgagatggtatttcgagatgcatgtgtagagaagagagaaagatgtttccaggtagggacagtagaatgaacaaaaacgtggcaccaaaaagggaaatgcgaggtatgtttcaagaagagtgacagggagcccagtgtgttggcatatgcctgtaatgcagctactcaggaggctgaggtgggaggattgcttgaatccagcagtttgaggctgcagtgagctgtggtgatgccattgcagtccagcctgggcaacagagcaaggccctgtctcaaaaacaaacaaacaaacaaacaaacmcaaacaaaaagagtgacaaggataaaagagtgacaaggataaaagagtgattgatgctgttattggagtctagtatgccaggttgaatttggattttattttataaatagggaaacatctaagcattctgaacaagggagaggcacaatcatggctctcttttggsggaaactaaatttatactaacgttaaataaatcggagagggtgtcagagttcagagcagaagaaaacaagactccgaaattagatgcactgtccagcgtatagtaagtaattgggggtatattcagataatgaaaagaaacctagacaaaaataaaagcaaagggaagaggcctgcatttgctggggtaaatgaggctctgcagcaaatgaaagactcaaatgtataatggcttaatacaagagagtgtctcacctatgtcatagaccaagactattccaggtggttggctgggtagtcaggccctttctcacatagctattcagtgacccatgctgaggatcactctgacatctcaccaagaggattccaaaagcctgacttcccaattgaccagtaagacaaaaaatcatggaggaatgtatgtgggaggatttaatggaacaagtctggaatttctgctctgtttcactgttcagaatttggccacacctaattgcaagagagactggggaaataaagtctaactatgtgtccaggaaaaggagaaataattattttgaggactggctagcagtcttggccacaaagaccaaggagagaaacgtagttaatgctaacatctgtggattgggaggaaraagggaaactagagagtaatagcaacaataataaatataatgaacatctattaacttcttgttttatgcggaacattgggctttatgcatttttatgtttaaacatcattgtagtcctgtaagggaggtacagtgatttttatgtgactgatgagtaaaatagggtctaggaaagtgagaagggccctgagtcatacaactattgggcaataagtctgactccaaagctcacattgattaatatggagctggagacgggttcctgagaattgtaggaagaaaacaaaaatagttcatttgtctactgcattcttgtgctaatgccacccaggctagacaactttatgcaggattcaagagtccccaagactaccctstcttctgacatcagttgcaagttcgggacccccaagaccacactcagcttcagtaactcactagaaacactcatagaactccctgaaagctgttaatactcacatttgtggtttattacagtcctttccacrtagaatcatggttcactagctaacttctcccagcaacmatgtrctataatatacatggcatagagccaagcagggaagctcattcgaaccttgatgtccagagttttaagtgggggttggtcctgtagacagcgttgactgcccatttggttgacaatagcctctagcccctctgggggtcaagctgataccttatggcccaaggccgccagacaaacaaaaacacttttatcaggcaggactttccatgggcttagagattactttcttggagctgaaagctcattgctttatcagtaggttttgacattttacccactgctacattttrgacttcactttctaaagtagttagtgggattttgctgtggtttccctcatattggctgctgttattatgcatctagttccatcttctctggtagatttttctccattgattaacacagaatctcagtgcctggcaccagtgttatcgaataaagaattgttgaataaattaaagaataacaaaatgaaaaggcattattctgtataaatggttataacttagagttggagaaaagttcccagtagtagaatattttaggttgtgtggattgatgtcttcaggataccttgcgaagaagtgcctttctactttttttaaagtgttgtcatcatccatcactatctgaaaacttttagggtctgaacccatagctatgcttctcttgcatctgctgttgtcccacaaggttgactgtgaggtgaagcctattttcccattgacttccttgaaaaaattgaacttgcaacagggaaaaattaccagtagagaagaaaaagttttggtgaacaggtgtccaccctttgatgtagagggcaatgatcctggtcagtgttgctctccctttaggaatggttttgaggcactgggagatgtggatggtgcactcctaccaccagggtctccctgtgcgttgtcctgaagcccttgacatctatatccctagtgactttcacattctcttgtcccttcctgcctcacttctgtggtccaggacttggacccacctttcttggatcctgaagcacctacatcacatgtcacaatacaaattttggttgttcttaccccagaattatttgagtcactaggccctgaaaggaaaatgtgttctatctgaatctgaagaaatacgtttattttaaaagatgggtgacacttggtattttttcccagcaaatgtcatttagtgtatattccttttttttttctcttttcttttgagtcagaatattgatccattgcccagactggagtgcaatggcacaatctcagctcactgcaacctctgcctcctgggtttcaagcaattctcttgcctcaggctcctgagtagctgggattacaggtgcctgccaccatgcctggcaaatttttgtatgtttagtagagatggggtttcaccatgttgtccaggctggtctcaagctcctggcctcaagtgatttgcctgcctcagcctcctgaagcgctgggattacaggcatgagccactgctcctggccatttggtatatatttctgctttgctgtactaagctttgagattcaaagggctatcgtgtggacactgctggagtaggttataataaaagtggctcatgtataagatgggttttcattacatgattattctatagaatttcttattgaagtcatctgctcaggctgctataacaaaatggcagacttgttagcttaaacaacagacttcatttcccacagttctggtggctgggaagtccaaggtcaaggtgctggcagattccagtcctgggtagaatcctcttcctcacttgcagacagctgctttcttgccgtgtgctcacatggctttttccttggtgtgtgcatgaggggaatctcccatgtgtctcttctataaggacactaatcccattatgagggctccacccccatgaactcattacttcccaaagtctcatctccacattctgtcacattgagggtgagggattcaacattggaatttttttttttttttttttttttgagatggagtctcactctgtcgcccaggctggagtgcagtggcatgatcttggctcactgcagcctccacctcccaggttcaagtgattctcctgcctcagcctcctgaatagctgggattaacaggcgcccaccaccacacccagctaatttttgtatttttttagttgagatgaggtttcaccatgttggccaggctggtctcaaactcctgacttcaagtgttctgcccacctcggcctcccaaagtrctgggattacaggtgtgagccaccgtgtctggccaacatatgatttttgaggagacacagtttagtccatagtatcccccataaaaaataattacatgcccatgtacatctgatgaataaaataaaaacaagagtaattttcctgtaagccatggagacttagtcttgtttctttatggttaatctaatacaatactttccctaacagctcagagctccttttaagcaaatgagcaaaatatacaattaatatataaatctataatttccaagatagagtcccataagaaggaatatggaattctattcatcrtacgattaaaaaaaaaaaaaaacagtttgcttccccctttccccaataccgcactacacatttctggaaaatagggttgttgctcatcaggtcatacattctagcagctctkttccccatccaaagtatatgaatatttttagaagcaataacatttagtttgaaaaattgagaagtaattgggtgaagaccttactgaattagtaagatgtgaattagcagaaacgtattatgctttgagtacacagggacttagttttaagaagcctctgcccttagaaatataatttacctattactggtataactgtgttttcaaactgtctttacttaaaatactttaatgctaccatcctcctttttagctaatttgttaagcttattcactaagcaaagtcaaattttaatataattttagtctcagttgtcatgacatttgcagtggtgggcctggtgaataaggtttgacatcgaactatttagaggtgttttttcctcatttgttgaatatgtttcaaaaatgtccacctccatggataaagcagctataaacctaatgtttattttagttatagctcaaagtttttccaaacacctttctccctttttagaatttcgggagaatcaactctagcagtacttttagtggtcaaatgagaaatgtttagactccttggtttcactaactttcttgtatcccaaatctaaatttgaaatagttttccttatccctggaaaaaaaaaattgatgtcaggtgggtcttttccttgcaggagaatgccgtgaatggagaacacctgtggctggagaccaacgtctcgggagacctctgctaccttggagaggagaactgccaagtcagatttgcagtgagtgtgcgctccgtcttgctgggggaaggcctgtggatctgaatgaatagaggggtcaccttgcctaaatttccaaggggaggtttgaacgagcctgtccttgtgagatggaaaactttccggatgttttcaaggtttgcagagagtttctcaagttaacatggctttcaggttgtcgctcgtaatggttttagggttcacttatgcaggccaggccttggtgtcatgtgttactttataatgatgcccagggtaggttgttgtgtgttggtggggggcagagggtaaatgtgtacgaggtagtgtctccttatggaggagttgttggtgtggggccaaggcctgtgtgtggaggaaggggctctgtctgtagggaagtggccacagtgggggctttactggtgggtgaaggtggaaagagagggaaacacctgtgctgggaatgggtgtaggctaacaaataatccagactaagttctggaggatacgattctagaaataatataaacaatcaacagtcaggtcaattggagttaacttttgttgtttaaaatttgctttgtgtccctatttagaacaatctatttagagggttaaaattctctttatgttgtgaggtaagtgtggttgccaagtagtgcattgtggagatatcaaaaccayagtgttgagaaattgaacttaaagtttgtgtgtagttttaaatgattggtccaaacagacagtaatgggaagcttaggatagtaaagaagagataaaagatgtattccttcttatttggggaaattagcaccagaatttatagaatgcttttttcttttttaaaaaaatatttgtttattatgtgaaagaaatatttgcagcaagatgtagggccttgaaattgcagatgaatatgtgtttgttaataaccaatatggaataaatcgagtttccatcaaagcttatagaaggatatgtatagcccccaacgattttaaccaggctgcctaaaagcacaaagtcccagaaccaagaccttttttgttgctttagctgttttaactccttgtttataaatttcatttggagagttttgagagttctggggagaacagggcctgtttaagtgaagttgggaatcaatgtcagggaaagacccagatgaacaggctctggattggaagtcgggaaacctggagctgaatctcagtgttactgctcagtgtgtgacattgagaactcgtgacctttgggccttggctaccttctaaaacagagagtaggattaaattcttttttattaatttatttttgtttctagacctgtaattaatcatttgcttctcttctaattttgttgtaaatttaattgacttaaatatcaggatttcaactttatgcatatgtatttttaattaaagtataattgcatggaattggattgaattaacgaaatccatgagaagctcagctgtttggactaaaatgctgtaaataatgaattaacattagtgtcttggttaattgcgtaaacactggtcctgggatgtaagataataaaaaatggaaaaaatgaaagccagtattacttacatatatacttttgaacaatttctactgatggactatgattttatacagagtcatcccttatttccaaattgctccctttaatccctttctgttactttttaggggatggctacctctcttgacaaatatatgaacagatacgtatatcctctttaaaccttgtatcagtaaatagcattgctatccactgaatgattattacttgttcactaatacctttaggccaggaaaagcaacaaggagaataaaggaaattttaggtagaagtaggaagaaacagagttgagaacgttcccagtttccttctgaagcttcctcataatttcataccaggtacttggccctattaactcatattacaaaacgtctgaaagatgaagaactctcctccaaaaaaatgttggttaaatgaaggaataaatcagtgaggaagctgaagacctaactgctgtaagtttcttgaagctcagtttctttacctataaagtgggggaaacactgttttgagggtttggtgagatgatacatagaaagggcttacttggctcagcaactgacctaatgaattaaaggcaaaaaaagaaaaaaaagaaaaaacccaggaaggacaaggacaggaaatttacaaaagaactaccaattgccaatagatatctgaagaatacaaaggcatcccaattaaaacaactcaggagtcaacttcatgtgcctattaaattagcaaagatttataaaatggtaatagttgctgctggttggtttaggctgaaatgggcaggctcatcatcagctgccaggagtgtaagtagatacactgtccttcacaaaattggcagtgtgtactgaaagcactgaaaatcctctcagtctctctccccacctcgcactgtgaggcgcatgtcatctctgggcatcccattttgagagagacattggcaagcagcagaggacccagagtggggtgcccaagttggtttaggggatggaagcttgttgtaaagaaatgttaggttacatgggctacagctgagtattaggagcgaaggcagagagatgtcttccagtatttgaagagttaatttgaagaaaagagaagtgacttgctatctgttgttagaaatggaaaagtcatagaggtagaatccacygactctaactttataacaataaacaaacattacctgggaaacctaacaatgcacactcctgtttccctctttgctccaaatgctgattcagtatgcttggagttggacttgagagtctccgatttttttttttttttttttggatgtagtcttgctcggctgcccaggctggagtgcagtggtgtgatctcggctcactgcaacctccgcctcccgggttcaagaaattctcctgcctcagcctcctgagtagctggggttacaggtgcaagtcaccacacccagctgatttttgtatttttagtagagacggggtttcaccaggttgaccaggctggtctcaaactcctgacctcaggggatccacccgcctcggcctcccaaattgctgggattacaggcrygagctaccacacctggctgggagtctgtgattttaacgagcacctcaaataattctgatgcagatgggtcgcaaacctaactttgagaaataccgtatgataagaaagaactttgtcagcctgagcttcccagcaagcgaacaaggtgcctggagagattgactggtgggatgtgtgtttgtggataacgtgggtggccatgtttmaaggatgctgtagttggggactctcagctgctttgggcaagaggtcacagagatctccaggcgagtctttagtttaaatgctctgtttgcagttttcttagaacaacagtcttttttgggaaaaaagtatgcataagcagatcatgtatttatattctaatttcttttaatgaaccacctttgaagaaagcctacctgttggggctgggactaaattaccataaccaggtactacctgcaggctcctaaacaaagtacaggcagagtgctcaggggaggagtgaatccatcatctacgatgtgcctttcactccttccctattttagcaaagcaaatgtcacaagtagaagttaagagaaggaagaagtcagtgtgggttgaagcagacagaggcagcttcatggaaatggggttcgagctcagttttgaaagatgggtaagatttacataagtgattttgaagaaggagaacatttcgggcagggaagaggaacatgagcagactcagaggtggggcaagctctgtacaaacgaggtggcaatcatgagccgtgcatgagcatgtgtcagagaaaaatggaagtaagaatggagttaggttttttgaaacaaaacttggagtgcatattgtaaatactggtgggcttaggaagcatgactatagaatacattgtctaaaccaagacacttttgagggtgaaagtggctgctgttaataatgatgccgtaacattagggataaaccagaactgcatcaccctagcttatgggacattarggcatctatgtaaaactaaaactgtcctgcaaagccgggacctcctgctgccatgtggattgatatttggggactgatattggagggtactgaaagccaggcaatgacttccaaaaccctagaacagctgtaggagagtttgttcccaagcttcagggctaaaactaaaccacgtgaccttttcctgttctacagctctctggtggcaacatttaatactgtagaatacctgtgagcagatacgtaatggaattaaatttgttcccaaattggcaacagttcccaaattagcaactgtttctttttctggtctagataaaatataaaaggatgcaaaagtaatgaaattgaagtagaaagatcactgtttcccaacctgattatgggcactggaaacctgaaataaaattccagccagaatcactgtcgtttggtgacatttatttttatgtacatttattcatttattcattcatttattctgtcagtgtttgtgagctgggttgagtacccagtgcctcaccgtttagcgggcacagccagatagaaactgttctcatgctctggggctaggctatacaaacatgtttagccaaatatttgtacctaaaggagctcacccctccagtagtaatccctggagtccataccatcgtgcacctactcagacttgaaagaaacttgcctacattgatatgcaaattatacacccaccgtggtcacacagacctgaataggcacagatgggtagcatgggtggtcagaaggaaatagactttgtgtggactgacctgggtttgaaaacctgctgttccatttatgtactgagtaaagttgggacatatcactttgcctttttttgcctcagtttcctgatttaaagtattgctactgagatagaccacagcgattcttatttctggatgagcattatagtcaattatgccattttaccttttaatcttacctttgaagtgttggttcccattctggatgtaccacatcaggatctctagggagtgggactcagcctgatgtcaaaaacaaacaaccagatctacagatgattctcttcactgtcagggtagagagacagtgatccacttcagaaacagagtgtcaggaccaaaaaccgtggcctggttctcacacctggtgtgtagtggctgtgatgggctaaatagtgtactccaaaagatatgtcgaagtcctgacgcctcaggacttcagtacctcagaatgtaacttgatttggacatagggttgttgcagatgtaattaattaggatgagttcatctggagtagagtgggccctaatccagcatgacatgtgccsttataagagaagacacackctgggcgcggtggctcatgcctgkaatcccagcactttgggaggccgaggcaggtggatcacctgaggtcgggagttcaagaccagcctgactaacatggagaaaccccatctctactaaaaatagaaaattagccggggtagtgatgcatgcctgcaatcccggcggcattacaggaggctgaggcaggagaatcgcttgaacccaggaggcggaggttgcggtaagccgagatcgtgccattgcactccagcctgggcaaaaagagcgaaactccctctcaaaaaaaaaaaaaaaaaaaaaaaaaaaaaaagacacacagagacacacacacagagaagaaggccatgtggtgatgggggcaggaattagagtgaggcagctgcaagccaaggccctccgaggatcgtggctctcctcagaagctaagagacaggcatgaaattcattctccctccaagccttcaaaagggtgttcaaccttgttgaaaccttgatttcagacttctagcctctaggagtgtgagagaatacatttctgttgttttaagctacccagtttgggttccccacagaacacccattgccattgagtgggatcttagtattcagtggaaaagtgtttgagaaatgctcacacaatgtttgcagttttcctaggactcatactcatcatctctgatccataacaacaaccttttggggtggtcatatygggctgttcacttctacctaaagataaagaagagtcagagaggcttactcactatccagagctttatggcttctttgctttcttagggcagtgctaggaacctaatatagtagccattctataagtcgagttaccttatctagccatgcagataccgcagttacataggctcactgacacgtatgcacacaggtgcgtctacagcaggcttgagtgtttaggttgagtggtatgtggttgaggtgtaagtgagcagacaggcagrttggtgtcagaagctgggagctgcagggaacagagtaggtagatggtgaggtgagtgagcgtgtatgttgtgtaagaggaaaaatggaactgtcagacttcaggatgctgttaccagatatatcttctctatttttaaatgtgagcatgccaccctctttttgtggaccagctaataggtactgctttgcttttrttattgttttgttcttgtattttgctttagtcttttcctcgtagataatgtttggtgaaaatggcttaaccctacctgtgacaccctgccttaattctaagttttcttctaatgttgcttgcaatttgccaaatacagttttactgagaaagtgaatgaattgagttagagaggccatgtgatatgagagttggaggattggagggcaagagcttcacagatccagagacaaaaagatctagataaaaatgcaagttctgctctgcctttctgagcctcagtttcctctgtaaaatagtggtgattaaatctacctctcagaatcagtagagggataaaatcagttaacaaatgtttgtattcattttcctcctcttctgtacctactatggttcaatgtcatggagctgaacaagctaattagcagatttggttggactttggcttaacaaggccttatatttgggatgattccaacactaagactcttatggcttcacctgtcattttgctgctgtgtgtagcatccatattcttaccaagtcatgactgcggacaactgagtgggacaaatcaaagtaacccattctgtgatctcatctcacaagctgtgtcttcttattggtgaatcagaagcctcatcattgtctgtaacggggtatcacaatatttgctcacaggaatgctggtcatgtccttagattcttggaagaaactttcaagaagagtacaagggtcatagctttctgccctatttgaaggaaactttcagctttctgctgtttaaaaatgaaaatgattttgagcccagttacaccttgtctgtttcatctcaggaagaatgagcaccaggcagcagcttgtgaaaatgctggttcccatgcatctgtgtgtgtgggtgagaagatgaggcaatcagagcccgacatgcattactggggactttctggccatctgcgtattcmggtctagctgktgtgtaacatggagcaccagcattggacttagaatgcaccaagatctgcctgcatgttgctcctgctctgtcagcctcaaatgccagttgtctggcacagcagactcatgatctgcaccccagatggcagtttggctgagctgggtgcaggctgtcagagggaaccacgtgtgtggcaataaagcccaggaggcaaagcccgctctctgagttgtttgggtgccagccattctctgccaggggcctttttcaccattaggatattgaggatctaatgaatcaagatgactcatggaaagtgtggccatcaacaaaaataagaaaagaattttcacagacacactgtctgctactgagttcctagtcagtggatatgagagagggagagagtggggtgctctcagtggcagaagtaatgtcaccctttaggtgtctggcctgatagctcagcatttccatgagatcgttcacgtgcacacttagtgtctggcacatggtagaccctcaggacatgttagccattgttactatgacaactgtcatggggatcgttataatttggtaccaagtgctgtctgtatattaaaggagaatctagtgctgatactgctcacttcatgtaatggggatagtgatagtatatgtaggctatgaagccaagggatctttaggattctgtcacttctaggtgaccctggatcaatagtaccattgtctatttgcacagcccattttcttttgacccaaaattgtgttctggagaacactaaactcaaaagaaaacaatatacggcattatacattaaaaggagctcatgaccataaattttgaaaacactgaatgactttaatatgcaaataggtcctgtgaagctcaacgaagcatataaggtatgcaggatttcctactttttttttgagtggatgggaggattgtggaacccataatttccccacagaacacccattgccattttgtaggatcttaggagtcagtggaaaagtatttgagaaatgctcacacaatgctttgcagttttcctaggactcatactcgtctctgatccataacaacaacattttgaagtagtcacattgggttgggttgttcacttctacctaaagataaaggaaaaaaagagtcacagaggcttactcactctctagagctttatgacttttttctatctttgtgcagttcttttgcctttatactaaactttcattaagccaaaatgcatgtgtcttattttattcttagagtttgaacctctgagaataattgtcatcttttctgtcatgacaattttagattgaggctgcatttgcgtgtttgtgtaagggtgtgtgtttctgtgaagcagttctgttgttattggatattgtatggtcctgttacctagtaataaaaataatttgcatctgatttagcataaggcttacatgttacctaggcaatgcccaggtgtacagaaatggtttctcttcttgcaatgttttccaggggcagggacccacagtactggggtttaaccagtattcctgttgcttagaggcactcaatcttgatggaagcattatttgcattatcggttactccaaaaccactactggcccccaaagttggtattgtctctgtttgttaggagcttgttgttgttgttccctgccacattgatgaggtggatacatattcagaaggtgatgctttaaaaacacgaggaaatggaaaatcctgcattgatgccttcatttaagggggtgcaggtaatgtgttgatgaagcgtgtgagctttggaatcagatgacctggttttgaatcctgatttccaggctttgagttgtgtgacactggtccttgttttaacctcgttaagcctaagttttacatctggaaaatgggattatactgcttcttgtggttgttgtgaaaattaaaagagttaatgcatatataacagcaggctggcaaatcacaggcactcaataaatattgaccactataatcattcctccttgaatgaaagtggttccaagaaacagagccaaaagagacaactcagagtactaggtttggagagtcttagcatcacctactacctctgtttcctcgaggaaagttaaggactgagcttgtgaggtgaaacaactagcctagctgacagtcaggctctccctcccctcttgctccttcaccattctgtcaaccttttacagcacacaccacttactagctatcatacttttaaaaattgctcgcttatttatctgtctccaacactacagcataagctccatttagctcaggaactctgcccttgttgtcctctcctgtattccccacactgaggataagtgattgaactgaatagttaccctgtgttacttaacattgaatgaatgaatgagttcaatgaggtgcttgttgagagagagacacatacacacacagacacctgtcaccagatcaaccctgccatttaagtattgttatatttataatccaggacgtctgaattcctgcctcctttttaagactctttagagggagatttaacacatgcaggtagctgacttgtgtaaggttttatgccctgtttagccagtgccatgccttttgcagtgcattttatttcattctcgtggagaacagagactgctttttgccatcttggcacaggggktcatgtgtggttgtcattagtcagttcccctagggatctcatgagaacagatcatatgaagcaatcacgttaaatatcatatttcttatctatcctcatcagtcttggtcccccaggttaccactagcaaagaaaagaggaaaacagtaagctgtaacacatagagatggctttgggttagaaasacttccactcttagctagtctttcttgggcaagttgcacagtctcatagggtctcagttcccttagctgggtaagtcgtacctacttggcatggcagaagtgagctctgtttacagtgtgggtaatgtgtatattacacagctagcctcctggcaaatctctgtgggtatgatgtcctcattaaaaaatgaaatgggcgggtgtgtatgtgtcagtgaaaacattaccaactggaggtacagtgttgagtaaacaatgactgagatgtctgtgggtcttcctggactagattggctggaagactgccttaattatgtcaccaaatagcttggaatgtgaaaaatggcagtgaaaggataactaacttaccacagcttgatatcgcttcttaactagaaatacagtattccatatcaaagcaaatatctctaaatttttggttagaaatattaagctgtgaactttaagaaaataattctatttccacaaagtaaactgataatggaaacatgtcaggattcataatacaagtaagatggtgtttatggtactgtcacaccagcaaggactgaaaaaggcaaagtgtttgggatttcctagtttatactaaggctcaaatctctgctgtacccgtgatatgctacctcagaactagagaaagccaccaagacatagaaacaccattttctattaacttgttttgttatgacttctgtaatatgtctagcccatcttcactcaagtctgtctgcttgaaatttgtgaatgcacatgggtgtgtatgtgtgtagggctctaatggtatgaatttctacttattagtgtctgtgtacctgtaattatatttatatccatatttgcgtgcatatcaatccttcaattactctactataagacacctggcaactttgacctgctggcacaaataataaccttgaagagcgtgtaaaaatatgacaaggaacagccacaaaaccacctgtaaagagccaaaatcaggaagattgcatctgatgagttgaaactagtgaccggcygtggttgtatactgacttctaagctgagaagcatagaaaaacaaatggggaaaaagaaataagagaaaagagaagcaggcaaattttaaagaagcagaaacaagaaacaagggcaacaaagtacagagaacttcaataataagaatgatgaaatatgaagtgtccttgggtaaaatgagagccagggtgggaaacagaattatggatttttaaggatttcttcaagttcattaggctggaaccctttttaatgtatcatgagcatgagggaagaggcagaaggaatacctgagctgcccagtaatctagatggaggggcacagtgagtatcattccccatgactctccgcctggcaactctgagggcatcagtttgttagtatcatttgattagacttgtgcaaacccattcaaacttatcaggcccttcgccatgcttgttataaagactggctgcaatatttgttttatatctcaataactgtgcctgaattgtaagaagatttccaaaagatggtggcagtacgcgatagtcacccaaatgaattccaaggtgtagacttctcctaagattcacgtcgtagctttctgtttttttgtttgtttgtgtgtttgttttagagacagaattctgccatgtcacccaggttggaatgtggcgatgtgatcctggctcactgcagcctcaaactcctgggcttaagtgatcctactgcctcagcctcctgagtatcagggaccacaggcttgctgtagatttctgttgaagcctatcagagaaactttgtgcctatcactttcttctcattaaaaagaagtattaaatccactaacataagtcacatttaaccatttaagagtgtgatttggtacaaattttagtttaagggtaaactgttgagatacagacatgtacctttttcctcccttaaaaagaatcctgtactgttctgactgtagtttttaccaaacttaatccagtgctcaaaacacgatggatgtatcattctttgtaaccagtcatgaacgttagctttgaattaacgcaatcctagcaatttggttcttaccaaattgtttctcctatgagccccgattggctgcttctcaggaagaggaaaggttttttgtgtgtctttctagttcttatattcagctcacagtcttttttttcccttggctttctgctgtaagattttggttttctttcccttcagatgaaaaatataaaatacactggctatctgggaaatagacaactttttctttctggttcaaacaacaacacacaggcactgctcttctttctccctgtaggtctctcgggaggtcatggaattgagcctgcctaggtggggttcagcctagtatctagaatctacctgcacatctgaggttactcaggggaggtgctaggaacatcaacataaacacttcatatgcagaatgcttctgataatgtgtttctcagaacagaacaaaacacgctgttcgaagagcatcaagtgagttttcctgcggtactcsagaggcarttccaaccataatagagcatgagactgtcaggtatgctgtcagcccagcatacacatgaacagcaaagctgmccaaggggtaggattgaagccctcctgagctgctgatgattctactgaaatacttaaggacaaaatataaggaattcacactgaccttagtggaggctggtgtggggctgggaagagggctgtgtgctctcagtcactcttgtgcctctgcctttcctttttgttccattcttgtcactccagttcaggcccccatcacctcatacgggaaattatcactgtgacccttgaatttcttattctctttcaggaaaaaaagccagtgtcttaaccacgacctgcaacacagcatgatctggcctgctgttatcatctgacctcatctctactccccaacactggcccccagccactccttagcatcctgacatcctcatgcctctgagctttgcatggctgtgccctttgcctagaatgtttttccgccagatatccacgtggtgaactctctcacttcctttgggtgtttgtcaaaatattcagtgaaaccttccctggtccacctgtctacaacttcaattttctgctactcttgatgtttcttatctccctttctctctttaattttctttttagtacttatttctgtcaatatattatatactaatctctcttgtttgttgtctgtctctcacaggagagtataatttctatgagatcaaaacaatttttcagggctgggcacggtgtctgatgcctgtaatccctggttctgtctgttttctctccactcctgcaactgttcccaaataaatattccaaggtttaactaacctgtagacacaggtggcatcacatgagccgcagtaatacagatgcaactgtttttaactctacgcagtctatgtaagacctcagtcttctgcaaaatagcccttctatcagatagtcctgtgggtccccagaagatatctgatttgtgctcacaaaaatattatagttgttcagctataattgtcatgcagcctctatgctttctttttctttttcctttccttttttttctttctttctttctttttttttttttttttttttgagatggagtcttgctctgtcacccagcctggagtgcagtggcacagtctcagttcactgcaacctccacctcccaggttcaagtgattctcatgcctcagcctcccgggtagctgggattacaggcgcccgccaccatgcccagctaattttttgtatttttagtagagacaggcttttgacacgttggccaggctggtcttgaactcccagcctcatgtaatcttcctgcctcggtctcccaaagttctgggattacaggcgtgaatcactgcacccagccgcactattttttccctattgtgggcagagggcttccattcctcaaacagtctgagggcacctcattactgttgcttttgggattgcttattacgagaatgtctatgtcccggtgggggttttgtctcctaatgtttcctaagccaccaattctccagaccggggctgattgagggttaagtggggagggagccctatgtcagaagccctttctcctttcttccctccccctttcctttcagaataactgtgtcaggcagtgttcttggttctcagtgctggaatatagcggcatggaaacacacagagaaatctccacctctctgtaactctgtaattttgaaccccatggcttctggggmgtagttctgtttccccttctcatgaagctcctcatagacagctcctctggcttcttaacacagccagtgtacctacttcccaggtttgagggctgccagcaacccccagacacaccgttcaaacctccacactcaacyaccagccctgagcccagtgactcctgtacatagacacccaggagcccaggaattgtcccgcagtggacatgccaaagcaggtctccatgccttttcagaggcgtcggtgcctactacgtaaagagacttcagatctttttcctgctggaatgcctttgatttttttgaatatacatattttaagcccaaattaaagaatttgctttctctgctagaccctttttactggttcagcctcagattttgccctcctctaggtgacagcttttcttgtctgggctgttgttgagcatgtcgccatgtgtggctctctcctgtgaatggccttttctaccaagttcctcttgtctcctcaagtagcttgccagctcttgcaaggacagaagcttcctcctgtttatatcctgtacagcactcacatagtcttatacacatagtgatggttaaaataattggtggactgaatttccataaatatattctggaaaagtcagcagtaacagattgtttcagccatatggaatcttctcttatgtaggataactcaaaccatcatgattccagatacccagcatctacagattcaggagtattggtgtatatctgagcattgcatgagtattttggtgtatcctttgtaagagtctccaacccaacttctagttgttcctactgcttttcttccagatattctgagatacttttggcaccatcccttatcaagggtgttggttgttgggggctatctcagaaggtttcagcctttaccaagtccttgtctgtccacagatcacattgcacaaacacatggagtctttacaaatgaaggcctgccctccaacatgggccaacactactcagggtctgggctgggaccttttaacatggagtgaggtctctctgcaattgaacctctaaggagaggtctgagtttccactcgggtcacagactcctccggacatgtggcatctttgctccttggtctggaatcatgagatcctgttgtcatagacagaatgagtgatatactgaggataaaagaagtgtgctgggccgggcgcggtggctcacgcctgtaatcccagcactttgggaggccaaggcaggtggatcacgagatcaggagatcgagaccatcccggctaacacagtgaaaccccgtctctactaaaaatacaaaaaattagccgggcgtggtggcgggcacctgtagtcccagctacttgggaggctgaggcaggagaatggcgtgaacccgggaggcagagcttgcagtgagccgagatcccgccactgcactccaaccccgggcaacaaagtgagactctgtctcgaaaaaaaaaaaaaaaaaaaggagtgtgctggaacttcagccggccaccctcctggcttgtccaaaatgttctatattcctttgaagaaaaagggaagcctgcatgagtgatggtggaggtcgggctttggccctgaaatcatattaatggaactttcagataatgtcattcttcatttttcctaatgccaatttatagattgcatcccagactccccagagaagtagaatttgccaaatatgcttgtcatttcttctaattaggtttttaaataaatcaaagaactcttgttttcatttaccttggattatacagcaacaatcttgttgygtatgttgccagagagacaatgcctactgagaggacaccagattcctgacattctaagagcttaggaaggttcctcccctccactttcctaagcattccattagccccgccattgaagaggaggagaggacagtcctgcctgggctgcatggcgcctccttcctacccatctccaagatgctgctgtggaccgggctttgtggtctaaaagggaaggagaagggggaggaggagagcactctcctggcctctcttgcagtttcccctttgcttgattttcagccttccctcggtttctagtcctcggggtgaatcttcccatctaggaggctaaggggtagagaaaccatgggggagaaagctgggaggcagctgggggtaggcctggcccagcaacctcctctgtccttctccttggcttctcaccatgtggcccccctctggccctttccccagcatgccccatctgcccccttatgcactcacagtattgttggtttctgcctgaagcccctttcctggctgtcatccctttgctcactgtggcctcatagctggtgattccttgcattasgtctgggaattctggagtgaggtgccatgagctcagactttgccctggtgtttttggtcctgcagcagcctctggcctctgagctcctctgagatggggagactaagaaccggttgccatgctggctcttttcctactgccttccccatgtcccatctctggtgattccacctgtcgaggtgggcaagctcagtgggagctcttaggaccgcagtagaagctatrtagtcagcaggcagtgcagttggccccactgcaagaagaaataaagcttgccgtgtgcctcattcagaaggggacagccagccttgttgtacctgcttcctgggtgtcaaacttctgacaattgggaatgacagatatttaattttacttaccttgggcagcaaaaaggccccaatccttttatagatcatgggcctgtgaaagtagctaaccccaggccctgaaggacccacccctcttctcctttcctcccctctcctctcccttctctcctaccctttcccgtcttttccccttccctctttttcatctttatttttcatcatctttcccatccttcctttcctgtttttctccatcaaactctctcaactcccaccagatattcattgttacttagcagaaatcacatatcttgctcaaaggaagaaaaaaaatagctttcttggtacatatagatcagggacttaggcaagggaggtagttgggtgggataggattcaatattaatctctttattagggacaattgtatactctctaccactgcctgccactgatgcctctgtcctcctcaatccccattccctgctccagtggtctaaagctgtgacagtttttctcccttgcctgctatgagctgaagattggtggagagctgtcactactttcaatgccagcagggcctgcagcatgggaaatatgtaggatgtgttttctcttataaccactgtatggctgctggtgagatcatgcccaccatcctaaaacctagcatatatattattgtgttgttatttaagtaaatgttggtcatgtttttattagaacagtgtaatataatggactgtkatctatactgtattccatattgtcttagtttaaacggatatgttcccccctctgcccaccccgtaccacacacctacaaataagtttcttttgaataccaacaccagcaaaatcaggaaacccttagtaagggtgcttaggtgctgtttgatatttaaggcagtaagctcaactggcctttaaattcattgatgagagcaaattattgttttttaaataattttaatttttaaacatgtttcatgttctaggcaatatttgtttaaattatgtttttgtgctaggttctataacaactgtgtcccaatgtaaggaataagaggtaacctactgaatgcttcttttttgagatggagtctcgctctgtcgcccaggctggagtgcagtggcgcgatctcggctcactgcaagctctgcctcccrggttcacgccgttctcctgcctcagcctcctgagtagctgggactacaggtgcccaccaccatgcctggctaatttttttgtatttttagtagagacgagctttcactgtgttagccaggatggtctcgatctcctgaccttgtgatccgcccgcctcagcctcccagagtgctgggattacaggcatgagccactgctcccggcccctactgaatgcttttaagtgacttttcttggtttaatttatcacctttcgtagagaagtaagcactggctcatataagttatttgggaaaaagygaatatttgtagtatttagaatgtccagattcctgcatcttacctttgtgtatagctgggaacttaaaaatgaaaaattgcaacctaactaagcacaaaattctaggtgttttgggcaatttctgtccggaagcttattatccaactacttcaaataactttaaccagttgaaatgtagtcatacaccgtgaagtcagtgattaaaatttccgatttgctaaaacagtttccctcaattaaggaactaaaaatctatttacttttctactatggcaaaagacctgggacctttattcagaatttatttacttaattttacatatgattgtaaactgtaattatctgatttctcagattaaaagctgttgagaagctgccatttaggaaattgagagcaacaaaagacagcaacactgactcaaaaggagctctacccaaacagaaggacaggaaagagaaaaatgactgttctttgtacagtgcatcatgttgtagtctttatgaagaaaaatttagaatatggtttatatattctgcctcaaaaggcacataagttcataatatattttaagaggatcttttaaaaatcaatatagttcagttaaaatcagttttagaacttacagcactcgactccatatattatcatctgcggaacgttgcacttcagtttttccatatgaatgatgttagtgcatttacatgacgttccagaaggctgagagatagcatatcttaatgcaccagttctcaaattcttctagcccagatcccttgtgcaaaagatgttttgactcagaatcctgatttgtaaaacaaaggaggaggcattgcatttcattgaatgcatgaggcttcctgagttttctccgcatcttccttccatcttcagtgactttcgtaacagactaagaaatccctggaactccatagaacttaatgcagagcgtagtgtcaagcacgaagctagactaggacaggagttattggcaaggagggaggcttttcaggcatccttaaatcacagcctgtaagtggttgcctacctgtggtaatattgcattgcttatccacaatgtaatttactaggagtttcatgggaaatgaatagactaaaatcaactccagtttcctttgtgtcgctataactctgattagcaatgtgactcaaatgccccatgcattttccacaggtggtgccaaagcagtgattcgcaccaggatatccataggaaacagaagggaaaccatgatttgcttatgggtgctctaccctgtagagcaaaatagaattttttgattgtccttttgattgctactgctgtgttactacgattactactgtatgttttcttgttcctccccctccttctttttctcttcttcttttcttttttagtagtagaacaagacactgttcagtagtgtagctagatgctttggtttcttttatcattgttatgtgcaaaagcaattgtcaaatgtatttcatgtgctacaccatgttcttccctcaggaagaggaaatccgagagtgataaaagcatctgcaagcagaataaaggaatctcagtcagtggatttcttctacaagtttcatggcagcggtactgcagtgttttaggttctttgttggtggctgataatgtgtaaataccccatgttgaatgaatgcagctgtccaagacctatgaggctgcattttctttcctaatcctacccctccaaagtggtggtttgcagctcttcaaatctctggccgcagcaatgctttatttcttctcacctacctgacacagttgactcaaaaattatacctcagcaggggaaaccactcctcggaaggggaaggttgccagcaatctctaagaggacaggaactcaggacctttcacacttggatgctttgatagcccatctgacagacaggcttagttatagtacatttctttcaggctcaaacacagaaattattcatacaaatcctccttccagtctgtcctttatagagagggctgaactttcctatcttagatcctgcatgacactggcagtcatgaaatgtagattctgctcattcatctctctccatgcagtccattttttatcattagagaaaaagataaactttaaaaagttttatttcattataattttaaactaatactgactgtcagagaggccgaattgtgtaatgcttataagcatgagctctgaagccagaccacttggccctgctgtgccttaattcactgaccttgggcagttttctcatcagtgaaatggaattaagaatagggcctgtttcatagggttgtgagggttaagtgaactaccatttgtgaagtgcttataagaacagatagcaaatactatattcctattagcagcgtttcctgcttttgttgctattcttattattgtttcctgggcgtaaaagctgaacttgccttcctttacttctggaagatttgggcagaaaccgaagtaacttagtctagactcatgcctgggatagaagcctaaaatgactggcccctggaaatctagactctttggcaatagggaaagaatgcctgttttcaacttagatctgagtttggatgttggtcttgccccttagctacttgagtgataatgtagaaaatattttaaaatggaagagaataatgcctatattgtaaggttctgaaacttagaaatgacagaacaaagagccagttcttgttatatgctcaaaatattggagctattattattattatttgaagagacaatctagcccaccctaaatcatgcagatgtggagctacttggtgartgcagagactgttgataaagtttgtcagtttattcaatatttaagatgaagttttaaatttgctttgtaatagaaataattacaatgtttgctgtatttatgtatttattatatatgcccactttaatactagggaactcttcagaacagactgttaacrtttcttttttgtcttttgaattgaatattgtagaaatcagctctcaggaggaagtgtgcagtctgtaaaatcgtcrtccacaccgcctgcattgagcagctagaaaaggtaagagcgcgccccctgctgcagttttgttacattgcaagtatttggtcttcagaggcccggtgtaaatttccagttccaactttttgaaaacaatgcccttaaaaaaaagctggaagtccaacattattaccagattactaatggaaagacaatgtttaagggtcgttcactctcttgtttgctgaagtgtaatttgatatcattttacgttgactcttgggaaaaggaagaacacagttagatggaaaagcctggtgtgcactgattctcttattatatcatctcagttcaagcattactatccacccataggctgttccacaagctgtttaagaaggaagaagttctataagctgtttataattgttgttcacatatatctgacttgtgtggtttacgtcttcctaaagtgcctgcaagggagcgagccacgctggaagccggctctcactctgctggggcagtgctcctcctgttgctgctcaaatgtgtgggtggggctggaagtgacatcccggtggtggtgtgcctccagaatcagtggattcggcaaagtccatttatttgtcatttaggggatgggaaaggctccaatagtgagttgcctgccatcctctttcctttcacacttcccactacattttaatgtgtgtgtttctctgtgtattatctatgttcttgagctgtcatgggtaaatgcattgaaatattttagtcccccatgacattcatgtagtttcactgacatgaccagttgatcctagctgatatcttgtggcaatgactaccaacatgttatcttaatattttcttttctgccccaacttcacttactcatctctgccttcattcttttgctcctttcactttatcgagtagctaaccgaaatgtcaatgtgcctactaggagacctccacatctaaaagaaaagcagtgctgaatccttttataaagaataactctgggctgggtgtggtggctcatgcctgtaatcccagcactttgggaggccaagatgggtggatcacgaggtcaggagatggagaccatcctggctaacacggtgaaaccccgtctctactaaaaatacaaaaaattagccagatgtggtggcacgcacctgtagtcccagctactcgggaggctgaggcaggagaattgcttgaatccaggaggcggaggttgcagtgagctgagatcacaccactgcactccagactgggtgacagaatgagactccatctcaaaaaaaaaaaaaaagaataactctgttgtctttgaataattgtcataatactaaaaaaactcaagtttatattttctacttttacaatcagaaacccagctgggtagtttaagctgccagtatctttcctctggctctttcttatctcagtttctcaaatttatggtgtaagagcrttatcgtttaaagatacttagatttsatttgtgagaatgaaggaaaggggttggagatatagaatcacctgggatctctgttgattatctaatgtgatgatttcaaaagactaagaagagtattattccttgttctttggaggttttgcttttcagtctcaatatctgtcactgtttttttttttttcaggtaattcagtctagtctgatgcttatctctaatataatatacttttctttttgaatgacagattaatttcagatgtaaaccaacwtttcgagaaggaggctcaaggtcaccaagagaagtgagtatttcagagcttgatttcaagtatcacctttgatttctcattgattcagtggattcatagatattcaccagggaataaaaaataaattctatctctttctgttgcatgccaattttttgttaacacatcaataagcacaatcaataaaatcttcaagtcttttcaacatgtgcacactggactttattctcataaaatgtactggggagtttaaggtcttaccaaatgaaccagagactagaggaaggtggtagtgatagaattgaaggggtaagaaagaaatagacttttattacttatttatttggagacagagtgtcgctctgttgccatgtgttctggttgattttaagtgcatttttcaattttgagtgggtataagccattcatggggcagcacagtaactggttattcctatgagccctggagtcagacggtctgctttcaaaaccagccttgatgtgtgtgatcttgggcgtctcacctaagctctctaaatctcagtgttttcatttgttaagtaaaaaataaatacatcataagctagaactatattcagttctcagtccctgaccctccagtctggtcgtgaagataaacaggtaaagaggaagttagaatgaagagttgttactgatgtgttagtgggaagcagaggtatgacaagaggagacagcacttatttgttcacattttatttagcagagacagcaagcacagttcaggcaagaaccctcctgtgttattctggacagttaagctccaggcccaaaattgcactccctaatcagtgaaacaaaagcctgcaatgaacagaacctgtcctcctagaatgtagttcagcctgcccagcagtcactcactgcctcccaaacattagcatcttatacggtatcctccttaagacaaagtctggtaaaaatgatttctgataagcatactttctcagggagacgaggttcagttccacttacagatttaccccttggaaacctccccagctggtctactcctcagatcagctctgtgtagtaacaaataggaaagagaggagaggggtcagagaaggggcttcctggaagaggcggcaattaagctgagaccttaaggagctaactaagttaagtgagaggagggtggttaggaggtgagtggcaagagccttccggatagaaagaagagcacacaagtccaagtgagagagggtgtactgagtaagacatgagatctgasatagcaagagctggaccctgaaggtccttgtaagccatgctgcaagttgagtgttttatcatcaggatagttgggaggtgagcattaaactactttaagccaaatattgttcaggctgcagcgtggaggaaataccatgcagttcaagagttggaggcatagagacaactttcagaagccatgctagtaatctaggcaagaaataatggtgacgtgaactaagaataacgttggtagatatgagtttgaaggaaacaaaattgacaggatgtagtaattgattggattttggacacaagaggagcccagactaaaccaagctactgctaagtgcgcgcacgcgcgcgcacacacacacacacaaacacacatacacacacacacacacctgaaaaactgattagatgttggaaaatgagttgatttgaggatgggctggggaggtaatgagtttagttgtagaactgtgaagtgtgaggtatccctgttgtcctcaactggagatgcccaatagaaggttgagtgggtatatgagtttggagcttatgaggaagactgggctggaggtcaggcattgtgagtcatcagcctatttacacagtaatgaaagctgtgggaatagatgaacgtggagagtggaaataggagatatctgagaatcacaaacatttaaagagagttgatgaaaaaagacaacatgaatatgaatgctataattgctagtgacaatgcaaaaggattgggagaacatgtggaaagagagtaggttgggatggaggttgtagaaagagaaaacatagttgtccccatcagttgtcttctcccattgtgtttgtgcagcatggcagcaataggaaggttgtgggccatgcgcagggtgaggaaagcaggagaagaatgatagggctgtggtgcctcagtgccacccagagtgcagacagtgtgggccagaaggtaattcagtggtgactcaattgaaggaggtgctttatttaggaaactagaaggggttgtttcaagttaagatggagtttatgactttccaaccaggggattcatatacccacctttagcttcctgccctccaatatgtatctctctcaattgataggtcaatgtggaggcaggggaagagagaaagagagacaattttaatcgtgcaatttttctaatacaagatgcttttggttttcattagtctgtaccacttctctgaagctagaccttccataagggttttggatattctcccttgtcttcttatcaaggacttgaaattcctttcttttatatattttcatcccctcatttctagataatttctatcagcataaacacactctaataatttctatctttaaaaaaacccaaaaacattccttagccacaaactgtgtcttacctactgctctaattctcagttttgtggtcactgccaagcttccagaaagtgttaactatataaattattttcggtatgtcactttctagtcattgtaacctgttctgatctgatatctactctacccatttactgaaattgcttcttttttcagtgttgcctatgatctcctatatgctaaatgtattaggtattatttatttttctgttctttccttatccagtctctcaaaaatattcaagatactacatattccatcctttttggaatgctctcctctcttggcttctcacatcaccctttcctaattttcttcttgtttcatcagatggcccttcctattctttttcattgcttcctcccccaacctctgcaaatccctccgagcttagttcttttctatgttctcttccgtctgcccactcctgttagaggagcttatccagtctcatggcttcaaataccatgtgggctgacaactcctaactttacatttccagtctgcccttcttggagttccacttggcatgtcttttgaatgtatcacagtcatctcaaatataatacatcaaacactagactatttccatcaccataaaaatgattttaagaaaatcgtatgcacctcaggaaatgagatggctgttaatctggcttctcaactgagaaaactggggagtcatgtttattccttctctcatagactccccacatctaattcatttgcctgtcctgtcaattttatttataaaatatatttcaaatccatccaactgtctccaattctgttatcagcaccttaaactaagacactgtgacctctcccctttgaccaatgtaatagcttcatgattcttcagttgtcactttcaatccacccatgacttaaaggagtgatctttcaaaatgaaaatcagattattaggttggtgcaaaagtaattgaaagtaatgacaaaaaccacagttacttttgagccagcctaatataattttccctggcttaaaactctccagtggtttccataactcttagagcaaaagcaaaccctctgtcttggcatgaaaaggtccacattgtctggcccctgcctgcccttccagccacctccagctcccacatgaactttctttccatttatgaggcatataccaagatattccccacctttggatatttgtgtatttcactgctgtactgaaaatctctttgcgtgactgtttcttacagttaggcctcagttcaaatatcatccccctcagccattgtcttagtctgtttaggctgttgtaatgaaataccatggactgggtggcttataagcaacaaaaattatttctcacagttctgcaagctggaagtccaagatcaatgtaccagcgtggtccaattctagtgagggccatctttggggttgcagactgccaccttctcattgtattctcatgtggaggaaagagggtgagagagctttctgtggtctcttttataaggagcctgattgcatccatgaagagtctactctcattacttgatcacctttcaaacaccttacctcctattamcattgcgttggggtttaggatttcaacataaaaattttgaggggacacaaaccccagtcctttgcagaggtcttcctttacaaccacctttaaatacatagcatattgttctttatcaaagtgtcttgttctttcttttcagggcactttgtataccataataatttatgcatattactgtttgcttgtctaaagaatatctcccttctttagtgtaaattttgggagatcactcctagattttgtcctaaattaattgcaccaaaacacagagtatgtcactgatggatatctgctgactgaatgcatttacaaaggtattcatttctctcaaaatgtttatgaactcttagtctaaaaggacattttgaagatgaaacttatgactcactgactatgacccatttgatattcttaattaaaaattaagaattcttactactactaattcagatgtttatttagtaaatgaaagaacatttgctttagaattagtttgaccctagttcacattatacctctgcttcgtttccactaagtggtaagagtctctggagcacagattgttggtcactatgccctggcatttgcatagtgcctgacatgtgacaagttttaaataaatatttgttggagtcatctaagttgaatctttctggatctcctttttcttagtcataagccataacggactgggttatgatttctaaggtcctttcaaactctatgaaatatatatatatatatatacatatatatataaaattttttatttctataggtttttgaggaacaggtggtatttgcttacgtgactaaattctttagtggtgatttgtgagattttggtgcacgcatcacctgagcagtatttaccgaacccaatttgtagtcttttatcccagttcaactggctgtttgaaaatagccaagcaattgtattgtgtatttttgctaacaatactgaatataagccctgaaataatgcattaccaatattttaacacctgtaagtaatagccctttccttgcccagtacttgaagttgtttatgaataattcagaagttattgacgagcaataaaaaggttttatggtgttagaagccttgctttgctatcttaacaacaatatatcaacagtcacatttgcagtgttaaggatcctgaatccaatgtcagttcagcaacttaggagctcttaataatggtcaaaagaaaagagtgtgagaaattaaagcacttgggatatgaggattagaataaatgattctatagtaactttttttccttatcgatgaaggcaattgatgatcctcccctcctccatggtaactatgtgatttaatcgtcaaagaaattaggtggataattccattcaattcaacacacatatattggatgtttgctttgttcaaactataattaagcagcagtagaataaatttatattgggcctaaaaagaactctgaacagaaggatgctggacatctcaaatcgcagagctgtagtttggagacaattactcattttcttctacgatagtgattttgtataagttagtttatcaatccatgccttagttttcggcttattttctaggaaggatgatattaaaaatatttaataaatggtagagccatagagagtaatatttaaataataatttttaaatgttcttttttattccctgactaaactatatgatattctacatctgcttaccaaattatatacagtagtcccctcttatccatgattttgctttccaaggtttcaattacccaaggtcaaccacagtccaaaaatattaaatggaaaatcccagaaataaacaattcgtaagttttaaattgcatgctgttctgagtagcacgacgaaatcttgtgccatcctgctctgtcctgggatatgaatcacccctctgtccagcatatccactacctgcccattcatcacttagtagttttctcagttatgagactgaagaatcgttgtatatgtaaagtttggtactatccctagtttcagtcacccactgggaatcttagaacatacctcctgggaagaagggataactgtgtgttgcagtgcaaatgatgaagtcagtgttaagatttctaaataattgttgatttatggacagtgttggctgactcttttgagtagagctgttacttgctaaatgatcccatgagtcagccatgatttcacacaggtaattgcatcaaatgtttccaacatgtttcttcttaaattgatagtcattaggtgatttataatctcaataattacagatttttttctgamcatcaatgatattgttccttttccctcggcttctgctacactaacagcaattatattacatttttctattctgtatgatactgtctgacatttttatatattcaatatttctactactgactgtcattgaaatcatttgttggtgtgtcatgttgaatagcgtgasscctgttttgcagaacagaggaaaggcacagtgacacaatggtaagggcacagattctgctgccaccctgtctgggtttggaccctcactttgacctttacattttgagtaaccacttctatgcattagtttccttatctgtaaaatgagaatgatgttgaccattcaagtcaagccctctgataatgtgccctactgtaatgcgaattgggatatgctgcagttggcagctggctctggttctccctaacccttattcctaagcaggcagtggactaaggttctcatcttatcggttgagtaggcagatgctaaaggtgtcagcagtagcctcagctgcaaagtaaagaggtagagggtccagtgccttcatcctcagtagaatttttgcactgaactgatgggatagatactgataactgggcaggttattctagaattgccgtcactttcttgaaagccacagccagccacaggacccagaattgtccatccaggtggawatttacgattgtacatacaaccaccaccagctgggcccagcccagcattctgagattctttgggggaaccagtaatattgctcagacagcatgatttgttttcagaagagagagatcattggaataggatcctggagacctattatgtcagaaattaacattataattgcttaataatgaggaggtagaagtggtctctaatgttgaggkgatgcaagggaggagtcagagagatggtaggggcactaaactgcaatttcccaatcaacatatatttcaatatttcaacaactcataggattttactgatatattccaactaagtggcatctctactcatgaaaattctcatgaagattagaagaattattacttataaaatattttttaaagcgcatggctcacagtactcaacaagtgttagctattataattagcttctttcttaggacaatctaagcttgtgtctttgttttattaaactgtggtagtaggaaaagtgagacaaacattagactaaattgtgggaccattgtgcttatttatatctgattatagttaaaagaccattgttcctccagggtctttgtttagttttagtttaagtggatttgacattattaagagaaatagaggtggcatttcagtattgataatgctaatgcttctcagtggtttcttgtcactctgaatttcatgccttgatatataaccttttttccctctacactgatctattttctgtccatctgtacgtactaatagaacagtgccttgcatgtaggaaaattttgaataattgaatatatattcaagtggtttttaaagagaaaataagggttatggctagaccctacaatagacatgttagaattagataaagtgtgttttcccagaaaagggcaaaagaaaacaatgagtactttaggggtattggtgtcagagggatgaattgtttgtaagttattagggcttgcctgcattcctagtcctgaggatgactttcttgtaatgtatcctgagaaccagtggtgaatggcgctgcttgactctgccccaggagtrcttgtctacttgggaggaagaggactttctgtgtttcctacagtctgagacaaagatagaccttgaaagctaatctgtaatagttcaaggtgcccaaggatggtttaaacacaataccattgcaaaaacatcattgatatgcttgtatctcttgtccttgacatctcttgccttcagcttttctctttcttcactctatctagtgaataattctcacgtctatgtcttgtattaggagatctctttctgagagtttgatctacattatctctagctagaatgtttggtatartgtctgcctgccacagataaagcactacatacctatttgttaaattgaacctggatattgttgtttcagcttctccccttcacctttccacttttgtttgggtatttcttttacctgcctcagttacctcccagctcaaggtcctctactgtgttcacaaatctgcagagtgtttgactattaagacagtagagtaactgcaatctcgtgtggccacttgccactaggaagacrtggagggagggcatgagaagtggaatctacagatatgaaagatctttggggatggagaagtaacttaatttgtccacgtagattcatgtttattgttaaacaagtcatacccataaatatttgtttctgggctcatctgggcttagatgatggtttatataaatcaatagtattaccacattaaaaaatgaatcttgagatttgcaaattaaaacatactcaatcaagtgcagtagctcatgcctgtagttcccactattcaggaggctgagatgggtgaattgcttgagcagaggagttcgaggctgcagtgaactatgattataccactgcactccagtgtgggtgacagagcaagaccctrtctatagaaataaatttttaaaaatattcatttaattttgttttcccacagaattttgtacgtcatcactgggtgcacaggcgtcggcaggaggggaaatgtaagcagtgtggtaaggtaagagcccagccacctcatggcctcgcaggaggctccccaggcctctgcaagcaactgaggtagatgagtcctgtccccaaatccagtgttcactrcatcagttcctttctgaaagaccttacttgtccaggtctccttaagaggcattgtagttgttctagaactcactgcatgaggcaatggtgttaataaaaagaattagcacatttttaagatacctggatgcattcttacagtgaatttcattgatgatttttgaaaacatgactgttttgtgaaaatgccttcatgaagacaactggctcatcgtactttggccaatcgcagcaaatcaatgggtttgagcaacactacgtttgctaatataaaattgtgtttgggcggaactgtttaggacaacatggtcagaagctagaaatgtgttgctcccttgggacattatccagttcatggaagagatgccctttttatttgtggttatttatatctacctcctctgtcatcatggctggttataggtccctcaggatgcagtgccacttggaaaagtgagctggagcaaggggtgggggtgttgtgattgtatactattaaatgccatagattccatgtgtcattgaccccaacagatttgggttacagctttttccaatgtacaaagatctactttaaggatgacagggtcctctgggagggttaaactggtggcgaatatcactataagtatgtatagtgtggttcaccaccaatttaaatgacattaatagtaagctgatggtcatcagtaaagggaagttttgatttggcagacagcaagataatttggggggaatatcttcctaaataattaattattcctctgtttgtttattcatgtgactcctttgggtcaagcattggtgtgagctgcccagtgcagcatttttgacagtagagcaatgcaaggaaatattggctgcctgagatatggttgtggagggtgagggagggagacttggaaaaaattgcattaattttgctgttttgcccaatgcctgggaagaaaatatgctgtaaccattggttaygaaggtcttctctggaaggctacacaccttagcctccagggcataggcctccattgtaaccagtattttgttctccagttcaaccctgtggctctcagttggttctcttttatcctgtaaagaggatgaacaaaacagggtgaaagcagggtgaaataaaacaaagtaaacaaggccgaagggggaagtggaaagatttgtactgattcttattggccatcctacatgtcctggggaaaaggaggtcacacctctactctcacatgacctttctctcttgggtccatcaacctcttccaaggtgttgccttggggcttatggattttcttttacttcaagaatcatcgactgtaactttcccataagtgtgcatgtgtgtgtgtgtgcatgcatgtgagggtaacagtatgctgcagccgggcaggcatagccattttttgggtcagagatgtaaagagtagtaagaatctggatgaataggtccttcactttggaaaaatatcttcactggagcccagtagctggcaccacctcaataatgtaagccataatggagtgggagggattttattaaaagaaaatcaataaacattttatactttgagacaagtgttccctagtgccatattgcactctcttctggcctcttgttggcatggtcaactgaacaggaagaactgggcttcctccaccctgagttgctgtgtgtcctttcctgccagtgttctcagccagccatcatgccatgagcacagctcgctgcacgtccgtygtcagtggggaagtcagtgatccagcttgtcacatcatgtttcaaaaatattgcactattatagtcatctcttgtgtttataatgcagcttctccatgaattcttcaagactcaaacaattatgggatgggtgggattgtctccttgccacataataaattacccttccttggattccagcttccaccctggacaggaaagctatggctctatttccatttacagattaagtaatgaaaattcactccaaacattggtgctatacataattttcatcagtagtgttgtaccttcttattcatattcatagacttttttttttttttttttttttttttgagacggagtctcgctgtgtctcccaggttggagtgcagtggcgcgatctccactcactgcaagctccgcctcccaggttcatgccattctcctgcctcagcctcccaagtagctgggactacaggcgcccgccaacacgcccggctaattttttgtatttttagtagaaacagggtttcaccgtgttagccaagatggtctcgatctcctgacctcgtgatccgcccgtctcggcctcccaaagtgctaggattataggcatgagccaccgcgcccggcccatattcatagacttttaaacctcactccatcccccatacacacacacacacacacacacacacacacacacacacacacacacactattccataatttactcattgggatggagtgaagaataattgcttcacttagcaaaacttttttttttttttccaactgatggcttgcaaactttacagattttttaggaagtgtttatggttaaagagtgtttgtggtttccatttctgcttttaaaataaacaataaaatgatgtttggactgattttctcttgccttaaatatgtgtttggctgagtgtgtgtggcatttaacagagatcagatgagataactcatgatttaattgctcagttcctttaacgttagccgaatgcctcaggctactaggtttataacccttctgtggtttttcattgtcattcatagtccttgattacataagagtcagggtcaaggcagaaaagagccaaaatgctcaagttcaaattatgtaatttgatgagagtttaatgaggagaatatttaaaatgtgtgaaaagcatgggggatggtgggtggaaccacaagaaaaaatggagaacactgtgactaatgtyagagagctgtggtcaagctaagcctgaagaggtgaggagatggagaggaccccttcccaggagctgcaactttcagtcacaagactcagccagcctgtggtgacctasagcctggagaaatagatacccagtagatacccagctccacatatcttcatgttctagtggccaaacccaacagaaaccatagcacaagggattgtttgatgcaatccataaaagccaactctttacaatgagtcattgagtagagaaggatggagagtaaaacttgagaggcagatggaattgatctagcacatattgtttaatgcaaacctgtagtcaatcaatggttggaggcagaatgcatacttttgctgtaaacatgtctctgatcttcactagatctacacattgccttcattcagtcaaaatttatgaaacactgagttgtctatagtgcttcaaaaaatctatattcaaaaaatatagtaatgattatggctattttgactcttcattttttgagggaagcaaacatccaaacctagcattatggtaattgtgaaaatatgtttgtaaatcacaacttaaaagcttatcttttatttcttcatatgtaaaagttataaaaataaacaagctaactttttgaaaatcaaaatttaaaaatttccaacatcaattcttgaagccagttttaaatgcagtatacacattgaatatcccttatctgaaatgccgggaaccagaagttttttggatttagatttttttcagattttggaacatttgcgtatacataagatatcttggggatgggacccaagtctaaatatgaaattcatttatgtttcatgctacacttaaacacaaagcctgaaggtaattttatacaatattttaaataatcttgtgcatgaaacaacgtttttactacgagctatcacatgaggtcaggtgtgaaattttccacttgtggcatcatgttggcactcaaaaggttttgggttttgaagcattttggatttttgattttcagattagggatgttcaacctgtaatacatagttaaactttgtctacattttttatactgttcagttcctgtattaggctgttttcgtgctgtttataaacacatacccgagactgggcaatttacaaaagaaaggggtttattggayttacagttccacgtggctggggaggcttcacaatcatggtggaaggcaaggaggagcaagtcacatcttatgtggatggtgacaggcaaagagagagcttgtgcagggaaactcccatttttaaaaccatcatagctcatgagactcattcactatcacaagaacagtgcaggaaagacccgcccccataattcaatcacctgccaccgggttcctcccatgacatgtaggaattgtgggagttacaattcaagatgagatttgggtggggacacagccaaaccatatcagttccctaaccaaacatgctacattaatatgaattatttgtccataaatagtatgtattttcatatattgtttaaatagcatgctgtgtttattaaatgggaaaacatcaaaactactctttatttttagtaaatattgttaaaaactaacttgagagtgaacttagggtacaatatgtaaattatacacaaaaatgccaaagtgtttaaaactagttcatgggagtgcagttgggatattacatgggtagtgaaagggattacagagtataaaaataatggaaaatactgacttgggcctttcaggaatgtccccttatcaacttaaagcaatgtactctactaatctgaaaatgtgtaccctgggagttaaggttaaggacaaggaagggacgtttaagggtgaggatccatgcactcattgggcaggtttggttatttgcctgtctgtgtgtttgtgcagctatagcaaaggaatcctctcccagtagcctcaggaggattacgagtaggtagagagagggcagtacaagggcaaggaatccaggatgctccataaagcccctgcccacatgactgctggaagcctggcccttctctccttggctgagtatcaagaagggggacaaggacaaccactgttctactctctgctcctatgagttttgactattttagatttctcatactagtggcatcatgtagtgtttgtccttctgtgtcttatttcacttcagtgtaatatcctatagattcgtcctgggagggggaaatggggaattattaggcaaagggcacaaagtttcagttatgcaagccgagtaaggcctagagatctactgtacaccatagtgcctgtaattaacaatactgtgttgaatacttcaaaatttcctgagagggttgtgctgttaagtcttcttaccaccaccaaaaaaaaaaaaacctaataataaataaacagggcaggaaaacatttttggagtaatggatatgcttttgtcatggattgtggtgattcatgggtgaatacttatctccaaactcatcaagttgtgtacatgaagtatgtacagttttttaatgtaaattatacccccaaagaattttttttaaaagaaaagaggatgggggctaaagggtccttgctgcagtccccagttttcatctgtagaaccattttactgctgtcactgctccctgggtctttggtgtggtcactatcctggtcatcgcagcaaatacagtgccctggtcaccctggggccctttgttctttcttcagtagttcccgcccacttgtctaccttcttctggctgctgctgttgggcctgctggtacttgtgaacccagatgacctgcacggggagcagaggcccaaacctcaggccagggtggcaatgaggacacttcctgtcatggtgttcaggtcccaggtacacaagcaaatgacccctttgctccctgatcatgatgggggacatggtcccaaaaagttccaggtacacaaggtcccaatcccaaaaggttccaggtacgcaagcaaatggcctctttgttccctgatcagatggtcctcagagacaaatggcttctgtccttcttcctcacttcctcagcagggctgattctgcttctacatatttaccctcctttttggagaatctggcccaagtcatgtgtctcatgataaatctccggttttgattccagtctttttaagggactgatctcattgcatatttcatatgtttttgctctctctgttgctgaatttgattgaagtataaactagatattagcaagtaaaaacattttatcaaaatgactatttcaaatatagtaatttaggtgtagatgaacaatcagaaaagcaaatctaaacatttttgaaatctttgtgttcttctcctatttagaattactgtcagatagatgagatcatatatgtaaagcagtgtatggtaaatgtgcacctcatatttggatgccaggtgaggagagctagtttcctcatgaaaagcaaatcaattatagactatgtacaaataataaaaaatttagtattttttaagagagaaattagaaatatacagcttctctgccttttaaattaataaggcatataaaactgagaaattataaaaatatatacatacaacataataaatatctctgtataaaatatataattaacatgttatagttatttacatatgtaatgtgtatatatgtatatctatgtgcgtacatatgtatctgtgtgtacatacgtgtgtatatatacatatgtgtgtatatacatacacatatatacacacatatatatgtgtgtgtgtatatatatacatatatgtatatatgtgtatatatacatatatgtgtgtatatatatacacacatatatatacatatatgtgtgtgtatatatatacacacatatatatacatatatatgtgtgtatatatatacacacatatatacacacatatatatgtgtgtgtgtatatatatatatatagttgttcttgccagataagagactgaaaattcataaaagggcaaaaatagaaaaaaaaagaagcattggggaaatgaagaaaataatgacatttaagataaaaattggaggaggaacatgaacaaaatgtatatggagaggaaagaagagacgaagaggtgaaaggtgagaagcaaagggacagaaaggtccagagagccaccagcaaatgagtaagagtatctggagaatgaaaaggaggagttgtgaagccaccaagctgatatttacaagctgagctgtgctcattcctgggacacactgggattccctagggcaggcaggcttggaaaggggtaagggaagcagttcccaaatcctcatttaccgtttgtctctttattaaaacctgaatctgacctgcctgagaacacttttgtgattctttgcgctgacctccctttccaaattgcctttcttcaatccgcttatgacggaaatcattcttttcagtctttgccccaggtgtaaaaccctagggatgtcaaacagacatgaaatattgatgtcagaaaaaaatctcctttaattaaaaaaacaatgaaatgaaatatgatttcaaggaagaaaaagaaatgatataaaattctctcttgttaaagaaaaagcatgttatgtattctttaaattgaccaccacagtgatgagcaaagccagtgcttagtttatttataatccaggcagagaaatatgagctgaatagttagctgagaagcaaaaatcaaggttctgctgattaataattggagctttcactccctatagggcaggattaatccaaaagtacatccacagttgattaaacaagtcaggtaagtctaaaagtaccttcaagttggtttagcagttggttaggaaagttttttattttgatgaaagtctagtaaacaggtgtaattcttctttattagtttcagctggttaaaagcaattttggtttaaacacagcattccattttgatatctactaggcaagtggtattgttgagaggacagttttccttttacatggaaaatgtttcctttttcatggtcttctccaataaaaagataggcatattattaccttttcagatccaaaccattattttagctcagggttcccaagaaacggactyggagttgagatttatgtgtatgaagtttattgagtgatctcagaagtgacaccggtaaggaagtaaaagcaccaggactgggtagagggaggtgttgaactgtggggcagtcacaacagaggccttagccaactccatggggaactggaagagcccttcagagttacccggacttgaccttggccttgacccacaactgggcgagggctgtccttggccgatgtcttcgttcattgcattgctataaagcaatacctgaggctgggtagtttataaagaagagaggattatttggctcacagttctgcaggctgtacaagaagcatggcaccagcatctggtgagggcttcaggaaacttctgctcgtggtgcagggggaaggaggagccctgagtgtagagatcacatggcaagagagaaagaaaaggggtgccagtgtcacccaacaatcagatgtcactggaactaatagagaattcactcattgctgtgaatgcagcaccaagccactcataggggatctgcctccatcacccaaacacctcctaacggttcccacttccaacactggggatcaaatttcagcaggagattctagaggggacagatatccaagctgcatcagctcaagtgactcttttaggctcagggcaattcctgaagatgggagggtgactcatttgaagaccttcagcttccaagactcttctcaactgagggaatgagatgagtggctcaggcctgaagcagagttatctgggtggaaagccacagtattcaatactgtccattcctggtgctactcagagtaccttgttttgtatcgtacatttttagagcagctctttcagggttctgattggtcacatttcctgggaaacatagaagaggaaggatatgggataaactatagcccccatggttgcagctggtcttacatctgctactgatattcatcatctctctcctcaaccacttatcctggattcacctcactctcaactagtgcctctggtctaggtgacctacctggtaggsggaccaagaccgttatctctctgcagtctgattccctggtcttggctgctgcagttgtctatttattattaaaattgttcatagcattacaaagcctgtcccagyggatttcctggttaccagatgtattcttccagcttctgttgtcaggtaacagctagatctgtgcctaaygatcaggatcaattactcctgtcaggatgctggctcctttctgtgcctgctagtctcttaacacaaaaattccaaagtaactgggtgcagcagtagcttaaagtttaagrgcttcctgttaagtcccatgacgaagaaattcaccgtcatgggatttagaycctcaaagcccggagctctggggaccagaagcacaaactcccaaagtgggccacagtaggcatagccactgttacttycwctcactggtttctgtatttctrtattttgtcatggagacacagcaccatgaaatgatcatagatttagtgagtaaacatactgagtctggtggatggtgctcataggatattttctcaaagctgaagccagtgttatattttcaaaagattattccatctctctgtcaggccttcatcttctggatggtgtaggccgtgatagtccagtggatctcatggtcacatggccgcttctgcacctctatgccataaaataatttccctggtctgacacaatgttgtgcaggatcctatgttcgtgggtcacacatttcgtaagcccttgcatagtggtgctgactgaggccctgaagaagggagaggtaagcccatatcctgaatatgcattgattccagtcaagatgagttgctgccccttctaaagcggaggggcttcagtgtaatcagtttgcctcaaagtagctggttgttctctctgagggatgatgcaatattggattctcagctttggtgtcttttgctggcaggttagaaattcagcagtggcaggagccagctcagttttggtgactggccacccatgctattggacccacatatagcatccatcactccaccaagggtactgcacttacaagcccattgcaccatccatcaatgggatggctcatgacacagtatggtacctgcgttgtgtctaagattttagttcttacaaagggaaagctctctggtaggaattaatgtgcaataatcttcactctttgtacttactttcatatgtccttccttatacctcttccctagacctcctgtttccctccagggccctggccaaccagccttgccatttatcactgcctgtgcatcattatatattctatgtcaagccacctatcttttcacataaatgggatgacaatttgcttcacctgaagttatgcccatgaggaggatttcttattattcctgtctctaggacccactcctgagtaggcttcagtgcagcagtagtttacttttggcctggacgtatataccaagttgatccatgcatgaaccaatctcagcattttcctcctctttgagctcgtcattcagtactcccatttttccagaggtgagttgaatgagagacctggtactgtaataatagtggataatgtgggtgatctgagccacctactcatgcatccctggtactgcttgttccagatctcagatggtcccacttactataacaatggattaaggctgggctsactcaaccttatgatgtagtgatctgacagaactcagctcatgacacctgatgattcatggacaggtatttctccaccagagtacartaacctgccagaaaatatttttgaaaggtgtatagttccctcttgcagatagcacaaccttgtttcagaatcctagagtctgtgttgattttcctattggtgcttgttataarcatcacagggcatcttttctccttctctaaatttctaatcacatggagtgacagggattctttcattgcaggctggacctgctgcagcactgtttcatgctctgggccccattctaagctggcagcatttaatgtcatccaataaatggatcacattcctaaatgtagaatgtgctgcctccagaacccagaaaggccaaataaagtgctgtgtttcattcttagtggtttaaattatgaaatgcaataattttttctttagattggagaggatattctagcataccttggactactgacccctagaagcttcattgacatgggggacccctgactcttcatagggcttatgtcccacctttcttctcaccaggacctctgatgtaccttccacttcttgctcatctgctttaatgtgatgctgctgatatggtggaccaaatgatgttctacagaatgttcacacagttcgggttcctttgcattagatctggataacattcagaagagttgaaagccctggtacatgcctgtaaaaatgtactgttaaccctgaaagcacttgcaaatagttttgaattctcctttcagagagggatggaaaaaattcatttgccaaatgtcatgtacttaaggctgaaatattctaaatttggcacagtggctgcaaatagagtgtactgggttaaatttgtgatattcaggcaccattctccagtctttggttttatgggatctcagctggtgaattaaatggggatatgttggagtacaccacctctgcctcctgcttcctttagtctttaagggtggcacttagataattttggaaatgtaaacacaataccatcgtcagagctttcaaaattaagataaatttaatgcctattacttcttaagaatgtgacattgattttgatttagttatggctagaaggatggtttgaagctttcacttgggcttcctcttacacaacagaccaagaaaccagtcttggggttgtgccagtttccaagtctgttcactccacttacacaattgaggacaaaggaaattaatactgatggatttgtggaaccagtagactctctgaaaaccagccctggtctaggactcctgctttttttttttttttttttttgagaacgagtttcgctcttgttgcccaggctggagtgcaatggcgcaatctcagctcaccacaacctccgcctcctgggttcaagcaattctcctgcctcagtggcccaagtagctgggattatgggcatgcgtcaccacgcccgagtaattttgtatttttagtagcgacagggtttctccatgttggtcagtctggtcttgaacacccggcctcaggtgatctgcccacctcggcctcccaaagtgctgggattacaggcatgagccactgcccctggttagactcctgctttttttttgtttaactgggcctcacgtttgtttgtttgtttgtttgtttgtttatttatttgagacagagtcttgttttgtcacccaggctggagttcagtggcatgatctcggctcactacagcctctgctccctgggttcaagcaattctcctgcctcagcctcctgagtagctgggactacaggcgtgtgccaccacgcccagctaatttttttgtatttttagtggagacggggtttcaccatgttggccaggatggtctygatctcctgacctcgtgatctgcccgccttggcctcccaaaatgctgggattacaggtgtgagccaccatgcccggcctgtatctttattttaataggggaccattagatacctggtgctgcttcatacccagggtatacatgtcaacttgtacagttgtccattagtctttagaatatttggacatttctctctctcctcagcatacaactacccaagttaatggatgtaggtccttttagttaaagaccagaaaagtgttaccatagactcttgctgtgttattgtaagattcttctcctggggacttaccctctccttcaatcaatggattctgtctttgaaaactagcttaggtcgagaaacagagcaaaagattatgactttttattgcaacatctgccctcatctctcttgatcatccattcttgatgtcttctgattctattaattgaggaatgtctcttttatccgataatccatctttcttgtagggatgtcatgctatgttaaccatttccatagctctctaggtcaagtccccttgcaacttcaatcttacagtaagtgcacccactttgttttgatggtttagtgctattattttagaattctatattccagttactgtcagagtgcccaatctgtaaggtgtttcctagcatcaggtctaacctacgagggagagccacctctgaacttcccaacaatgttggtgctcttctcaccagcacatttcttattgctttggtaaatggagtgtcctttgggcctctggcagatcatagtcagctgatgggcttttcagctgtacctaatatagcagctttagcctgcctagttctgagatttggtttgcttcttcctctgtcacagcaattcaggcatttttactttacttaacatggttcattttttttttgttcaaattttcaagaggcaccctggtgttatcatcttctagggttcttgataatgtgttaaatcctctagtatagattagtgctcccacaatgggaaattctcctttatccaactctaagttctgccctttttcatccttcaccctcaggatccagtcccccactctctcccattcctgctagtacatagtgattaggtcctgcagctagttcttttgagatgtagtttttttcactcttagcagcctcttcaccttccctgatcaggcacattgctctgcaaagattattagatcatttgagatactactgggaagagtagatgtagtaaaaccccaaagtgaagtcaaaactatttctagagagcagactcttttctccctctaaggcatatattacatgctaatgtcaccttgacataaattcatgaagcaaggaggggcacaatctgagtaattctgggaaattttaaagtctccttctcagttgtctgggaactagtatagcaaaatagtctatgtttacacaaaaaggaagtgtagataattctaccagcagaagagcattttctgcaatcaacgagctaaggctaaagagtaaagacaattatttcctgtaatgtcacaccatcggcaagattatatgttaggtggcttaactgatttgtcattggtaactctgttaacatcaatcctatctttcaaaaatatttaaactattttaactagtctttttttcaaaaaaaaccctgctttgtgaatattattagcattaaaatgataatttttattggtaagtttattatgagttaatcagaggtggaaattaattttcatggatcagcattgtcataatgatagctagttgccttactaaggtaatactttcataaaagaaaccttcctggtgttctaggacaaagatataaacccaacaggtaaaggttcatatatgattttggccttattgaatatagcactaactatctgaaaaaaatatttttgtcctaatatcaggatagtcatagcaatatgaaatataaatattatagctaaaaatagttaatgtaaattaaaatgtacatcagttgccattgttataggtgtctatctcaattccaaggtcttgggttaagttgtctgtttccacgaaggcatctgcttctgaaatgaagatatcgtggaagctatgccttagttgtttcatacagcatgacacatttgtggtaagagttgttaagttgtactgagaatcttgtgccttaaatttttgatgtttttccccagaagactgaatgatctatagcttgcagcaggagccttcagataaatgaatggaaaaagcaaaacctttctcaggatgatgggggtgattggctttgattaataatatattgtgattaccaacaatattagaatggaggaatttagaatacagaggggtaaaaaaatgtcaatctatggacataaatccttgattcctctggaacgggaaaatattatagacagtaarggcactgaaaaactttcagagtcttttattaatgccataaaagatattgtaattaaatccaagagacatgcatttagatttttcaaagatgattctaataaagtaactatctagattcagctaatttgcarcactgtcagaaattataaagatcttgtttactataatccaatatagatgaatatatatgtttacattttgaagatcttgaatatttataacaattttaagactagtaaaatttgtatagaaaatttaggaaatttagaaaacttaggttttctatgggtaaataaaccctagttttgcaaagtctagaatattatgctaccatttttacactgtgagaaaactatggaaaaggcatattatcaaaccagcctaattttcaaggtttcacattagtcacattaccaggcaagggtacacatatcagcagaaaactaggctgaataatttgttgaaggaaaaagccaataatttgtgtatgtattagggagttgggttatggtgggttttgctggttaaaaactgaaggctacactctggataagacagatatagtccgtaagtcagtagatagttggttaaaacaaatgccactttttatcactgaaaaaagttttcagttaggttggtgtgggtctgtacctgggtcacgtgaaggtctcagttgcttatctgcttccactggtggaatgcccaaacatcacagttgtttgtcaacttcggagggttggaagcaattatgttgaaacaccacaaccagtttgaggtcttcaagcaaagtgaaaatggaaaaattgtcttgacactagtgtgtaccaaatcactatgttattgctatcccatagaatacctttatatgtggtccaacagtttgattttaaaattttcatcttattttgctagaaacttaactttgccattaattaaatgtatgataaacattttagagatgaaatataaaatacataaaagtactttttttttttcaaaaatcataggaagtatttgtgtagaaatgtttggagttctgtgttttaagataaatattaacgaaagcaaattgagtcagtcttattttataattccatgggtttgtcctttgtaatactttgtgagccttggacacgctagtggatatggagaggtttattttgttgtttaaagttttggaggtaggaggaatatcaactcttgtgttggatcaaatcagatcaaatagggaatcagcctatggtcagaatattctctcaccccaaacaaagttaaatacagaaataatgaaataaattcagcttatcttaagtcaagccctttttttttctggtttcagccaaggctgtaaaactgagtgccctctggtacctgccctagatgacagaagaagtcagaaggcaacaaaactttagtactcagaataaatctggtttaaactttattccaaaggctcaatttgattgaaaaatcccaaagaacaaaaaaagaccttattcctcaatgttcttggtatttttaatcctgaagtcagttggatccaaagcatctggcctcccatccctattttcctctttgacggtactgaactaaacagctcttaaaaatcacagagtcggttgaacttcagtcagggcatctgtcagtaccatattagcagatttgggccaacatttaaaaatgagtaattgggaatctggttcattttggcatgctgagagcctggccagagtcttcctatagcaggtggtttaatgggaacttggtccatgaaggctctgatgtgctctatttatgtctctgtgttagatgataagcccgaagctatggttgctgtgagtctgccagacaagaatctaaaacaaagcacagagttgattaccaccaggctcattgccaagggccctgccacaatactgcataagtgtagtgcccagtgccccaattgtgattggccttattgtttgtttctagtatcggtctggctgttagtaccacagtgtattgtatctattctctcccaaaaaccagagggctaatacttagtagcgaggtggggctagatacactcaccctatatcattgagtagagcatcacttagtcacatattagacaccagaaagctttctcggcgagatggtggaagagattcttgttcatagatcttggcaataaaagcactccttagctttatataaacacacattaaatacataagtaggtaaagtgttataaagagttttaaatgcatggcctcatttgatgcttataaccacttagtgttataggagaggtttgtattattattcccattttctcatgaaagaggaagttagaagagttaagtgatttgcctaagatcactcagccaacaagaagatccaagaatggttctgagctttgccgtctctcctcagcttttgtttcatgcacagccatctgatatctaagtggagagaatggtggcctggtgattgcatttaagacttaataatgatacatttaaaactgtaacatttagcagacctctagttgtggctactactgctgtcttgccacaaattctactgtattgatttttatccatgccgcattttaatattgtggacttaaaaatgaacatcggaatcctaccatctttgcagtggctgtaggggttagtttttttgcctggaaggatgctgtgaggaaacattttcaggtggcttgggtaaggcttataatgtctggatagcgtgaagtttgtaattagatcatgacagaatagcagcaactttttgttcaattaatcagaaaatatcatggcatgcctatgatgttcaaagaactatgccagtttgctaagaactagacaaggactgactgccttcaaagaacttacagttccattgagagataatacatgtgcacacaaaataaccagccacatagggcagctatttataatggcaagggtaggtacgaggcaaggcaagcctgtacaaggagaggtcacagtgagttgaggttattttggaagactcttgtagattttttagtggaagcaaaatttagatactgtatatgaaatgggggtaggtttctagatggtatgttgggagtgaagaaacagccaaaaataaataaataaatagaactataaaagaataaaacatattgtggatatgagtagacctgtctcactgcggacaggaatttataatgcaaaggagtggaagatagatgtcagaaaattggtgggaagattatggatggccctgaatacctgcatgaagagcttgttctgttaatctgtaaggaaagaagtgtcattcaagtattttgaatgggaggcagaaacttagaaagcatcatttcaccgggtggcagtgcccaggatagagtgaggaataaagggagaaacagactatcagtggagggacaagttagaaaatggagcaaaaatccggatgggaggtgaccctcagcagagcgtgataccggactggacagaggcactcgggtctcaccccggcttctgctgctcttttccttcccacacagtagccacaaggtgtcgctgtagcctttttttgctccctgaaaaatggcttgggggatgatgaggagcttttcaaatggctgcaatgtgaagtcatttctgcagttttggtgccatcttatttcatattgaacagtttagcatcatcttggaaaatacctgcatacctcaccctttggcccactagactctgtgtcctcttgtaagctgttctgtttaggcggttgcaactctcaggtgttggggactgtgggggttgttgctggccctgtagtagtaaacacatggacatcaaaattcagcacttaagtccgtgtgtgtgtgtgtgtgtgtgtgtgtgtgtgtgtgtgtgtgtcagaagcactttttttcttcttgggaaaagatactgtcattgacagaggaagaaatagcaggagtccttatctgggaggagaggaacatatcaggggtcctcaagaccaccccaggttcagtgattcactaggaggacacacaggactcagtgtatagtgctaatatctatagtttattacaacacaaggatgcaaagtaaaatcaacaaagggaagggctcatggcacaaagtctggaggaggccaggcacaagcttccaagagtcctctcccaggagagtcacacaggatgtgcctaattcctccagcaaagtactgtgaaacacatgtggaaggaatactggactcagtgtccagggtttttattgaggccttttcacataagcacttttcacataatcacataagagttgcaactgcctaaacagaacagcttacaagaggacacagagtctagtgggccgaagggttaggtatgcaggtctctgcattgcacataataaaattccagacttccagaaggacaaaatgtacattggtgcaaaaagtttcttttctgtctttttttttttttttttaattttaatatagagataaggtcttactgtgttgcctaggctggtcacaaactccagggctcaagcaatctgcctacctcagcatcccaaagtcctggaattacaggcatgagccaccatgcccagtctgtgcaaacagtttaggcccaatgagactctcttaactgtgctgtcaattggagaaaccctcctgcaatccgagttcccagatgccaaccaagggccaaccttgcaagcagcctttctttatttttttttaaattttttattttattattttttttgagatggagtcttgctctatccctcaggctagggggcagtagcacgattttggctcactgccacttccgactcttggattcaagaaattctcctgactcagcctcccgagtagctgggattacaggcgcctgccaccaagcccagctgacttctctatttttagtacagacggggtttccccatgttggtcaggctgctcttgaactcctgacctcaggcaatctgcctgcctcagcctcccaaagtgctgggattacaggcgtgagccaccacacccagctgcaagcagcctttttaaggagtctgatttgctatgttaactcttttctgcacagggagtgaaaataccgcttaggtttttgagaaggaggtattgatggatacatttttcaaaacccaggagagtctgacgttaaggtcatgtctctggaagtggtagttcaggttggagcaaaagtagtgaaaccagtcctggttgtctgtccacatacagaagactggagaggtagaagagaactgggatggtgtgttaggaaatcaagagaggagagaaggccgggcgagatggctcacgcctataatcctagcactttgggaggccgaggtgagcagatcatgaggtcaggagattgagaccatcctggctaacacggtgaaaccctgtctctactaaaaaaatacaaaaaattagccaggcgtggtggcaggcgcctgtagtcccagctactcgggaggctcaggcaggagaatggtgtgaacccgggaggcggagcttgcagtgagacgagattgggtcactgcactccagcctgggctacagaccaagatcccgtctcaaaaaaaaaacaaaaacaaaaacgagagaggttcaaaaggaggaaatgctcggtagtatataaagtactgcagatgggcagggattatgggcgctgaaaaatgccattgggacataatttaataatgtggtaattgattttcaacttaaaattatctgtacacattaagccagacttacttagccagtgccttgaatagctttcctgcctatcacatctttctgttttcttttgatcaccttacaaaagctctgttttaacattttttattgtggctttgaattttttgtttgggtttagatttcacaggcagagggaaatggatgagctttgggaaggctaaaaaaattctttgtgcaatactacatacttctctctggccattatttagggacagcagcagccgaaaatcacctcttctgttctggatggaaaagtaattcagtttgttcctttaagaggattaggtttaccatttcattgatttcatcgttgcttcctggtaaagaataaaaattaaaagctgcttgttttgagtggagacatctcaaggggcttatgaaagtgtctgaatttactactacaccgttggacttctcccagacccggagttccagttattgtctctctgatatttcatttctttttttttttctgggttctcggatgctaaagttgtatagaccctctgagatgaatgattattgttagacaagaccatgtgaaccaataatggcttttcctttggttataataaaaacatatcagaacaacatttattttttcaaaaagctctttttgtgtggctgactttgagtagtaggtggtctaggaaataccagcacctcctctctctctcacttgaaatgcttcaggattagaaaatcattgcaggcagaaagtggagagtgtggtgctcaatgtggcctttgcaattctacttacctccagtggtgggtgacagtcctggccttctggccttattcacgtcaytgcacttcaggagggcaaatgtgcgctgtaactgaggtggttttaaattatctgtctcttgttctaatatcccagggcttccagcaaaagttctccttccacagtaaagagattgtggctatcagctgttcctggtgcaagcaggcggtaagattgggatgaaataaagcaatgtgggctcatgttttgtcgaaatacacttgtgtcattatttgagtttctccctggaagtagaaggcattcctaatttaatgtattgcttttctcatataggatccttggaggaagaaagacagactgaaactatagaacaatagcatagatgagctgggatacactagagagataaattaacttctatattttatgtacattaaagcttggggtcaaagactagaaaatcctcccctaattctaacactgggtctagagttgaggacttctcacacctagaccacattttccctccagtacctctgtattgttgagaactcctctggtatgaaggtacaacattagaagcaaagcaacgtatgacctaagaggtccctccaacacaggtggacaggaatcctggctcttctggttttaatgtttaatgtgcatgactttttattttggggctaagtgtgaggataagaagagtggttcttgtatgcttttttaggtttggatgttgtctgtacactcattgaaatgtagctctttcttacatttgaacatatatatactcattaggatctgatggtaatgtccctatttatttttctttaatctaccttttttcccactttatttagagcgtaattcctcggtctgtaccagatgctacattttcttatttgtttgtacatgtgtacctgtgtacctgttctttcttttaccacataacatatagtctaacccaggtgttggcagactacagctcgtaggccaagtctggctgccatctatttttgtaaataaaatttcactggaatgcagccatgcccagttatttatatattgtctgtggctgttttttttcatttatgtattgtctatagacactttcatgctacaatggcaaggatgagtaattgcaacagaggtggatgatcccataagcctaaaatatttattccctgtgcctttatagaaaaagtttgctgatgcctgctgtaatttctcaatgtccctattcttttgaataagttggaatatataaccccttcattgcacaggggacctgcaaagaaaaggctgtggtgtcttggtgaggttaaaggtttgcagaaaactcctgccactacacacatcacgctaaactagccacacaggccatggggctggaacagatgcatttagttgaaacatatgaaatggacattttgtgggtcaaaaccatttatattttggcagttccatatagttcaacttaataatatctctagcctcctacatgtcagaagaacctgctgtcactagatagagactcggtggtctggaaagctcagtgtcgctgcatcacaatcctgtgacattttttattcctggcattttcatttactttcagttagttgttacacaaataatcatttcacttctgttcaagaatgtgtgcacaaatataaggccatcctagttattgaatgaaactctgtaccagcaaggcaatatctccatttgtggtcctggggtccccagtgctgctatctttgctcctggttcttctaatctggtgagaccccactggtggggcagccttctgggcagcggtgtgctcagatcggctgcatctgctcctgccctgtgcagctaccaggctgtggtgcgatggtctatccagattcaattaatttggaaactcaatcccactttacaatgaacatgtgtgctctctttctattaatctgtagtccaactgaatcactacaaaggacaactttcacctgaccattgtggtagagctttggtcagttccacttatctttgaatttcccagtttcccaccttgtagaaggtgatttttgtaaggataataggtacaaaagatttgaacacaaattacagcggttgatatgttttcacagtccaggtgaaccccttctaggatatttgatgtcagacaagcaaataaatatgtgaccctttatggtacaggagaaagaatatggggtttgggacctggatttccagggttggggttttgattccatcatttaaaaactgtgcaatcttggatgtacctctgagtctctagagtggagattacttaagtattcattgagagacttgacataggcagtctctgcgatccctaatgttttagaaatgcagtggtcatacatttgagggtttatttgaattgccaagaaaaaaaagcaatttttaaagaaggtattcaaatgttaataatatttatctggtatatttgtttgcagatcaccaataactggtggcaggcagaattattaattattttaccagtattttatatacaattgcttgattaatgattagccactggatcacagcagatcttgaagacatgtagaaatgaaaacaaaaacctctctaatgttatgtaatgtaattagggtggacatatttgccagtttttttggagacggtcctaatttgtgtttgtgttttcaacataattattatcagtgatactttttacttttaacattgttccagttaaaatgataaataatatagttacgtgaagtataatctaagaagaaactgaggttgaatttttaaaatcactgtgattaaaatttaaggcctataattattgyataatgttgattttagttttctttttcagaaaaataaatgttattacacatcactatcactttayagtcacacaaaagatggttgaaaacttgactggcctaaggtcaccagtctgagtgtcactgttggggtatacagttaagaccctaatactgtggtattgttatgatcgttagcctacatttacttcctttcaaaagcaaaaatcactttagacttgccaagagtaatagggtcattgaattttttttttagcagtccagacaaacccaacagaagcaatctctttgtactttgttacttctgggattttcaactctgtagaagagacatcatgcttcttttctgccttctctaaaccggaaagacaacctgggaggatttatatctatgataggaaaaggaaaggcaggtggtaggcattgcctttctgcctgttcatttccttcttaacgttatcttagatcaaccaagtccatggccagcacaggtcaagggaagtgtatgtgaacattttgtgcaaaatcaggattaatagaaccctccaagactctaaaacttttaagtaaatattccatgcaacgattagaaagttttagcaggcttcatcctgctagactgatttcttgttatcaatgttataagtttgtaaaccggaataaatctgaagtctggtctctaagctcctggggctggctgggtggtgatgaggaaagcatgtcctcagtcctcagtgtgtgcccatgtgtgcatgtgtgcatgcatatgtatttttgtgcatgtaatgagtgtgtgtgtgtgtgtgtgtgtgtgtgtgtgtgtgcgtgtgtacatatttatcccttcttgctgcagcatwactctttgaccagaattgtttactggcttatttttctcttcagtttcacaataaggtgacctgcttcatgctgcatcacattgaagaaccctgctccctgggggctcatgctgctgttattgtcccgcccacttggatcattaaggtgaagaaacctcaggtaactgccaggactctggtgctgctgggccagtgcagagaaaaatgaactgctgcttcgtgcttttctccccagactagtctttgggttcctatgacctcagttcactcatccccaaggccctgtgcttagcttcctcagttcatcccattggcccatctctttcccactttgggctctctcatggaaccagcctccccatcctaatgaattcaaagttctagagcaggaatgttgcctcctcattcatgtgctaatgatattctctttgataggtgctcttccaagtttcattgagtactagtggtgggtatagctgatgcttatacaactctgttctcttccagcctgggcattcccagagggtcagtgtgagggcaaactgttcaggcttcatggtttggttaagattcctgccacttccaacctggaaggcagaccatgaatcatgaccttcctgaatacacaggcctgcttagagagtgacatttgtttttttcttaaggcaaagtagaatttattctcttaatatctaatctcattctgtgttctccccagtgcacttcctgtccttgtgagtatccacctcagtattcagggaaaccttagtggtttcttgacaaggtcgtaatctttgaaataaaatgtttctgcctttgtactatacatccttgacagttagcttcaagttatgggatggcagatttttaatgctatgggaagagagactatacctcccttagggtgcaggtactgtaggaagacttatcaaatgcaatacctttaaatgatatggtggtcctacttcctgtggtctccagactcatcatgtgattcattctcattgactcaggtttatttaaaaactggtggatcagggatactgttttgctttctgtgttttatataaagtttagactctgttgatgagtaatgtttacgaataaaattatagtctatggaagcccttgggatatttttttccagaggcaagtatagtgtctacatattaaaaaatgaggagcctagtgcttcattttatattttagaaccaaatgccaagatatgttaaatgagttacccaaggtgataaaacaaattatatatagtattactatttgaaattcaagtgtactgaattccagtttttatttttaaatctctttaacatttctactttaaaattttttttttctaaaatttggtaatctctccaaggctttacattaaacattcattcagttaaatccacatctttccattgaaaacctcgattgtatcaggaaggctaataggcattgcgataaaatacgtgatccttactcttaagagtcttgttatgaagtgggggggagggcttcatgaagaagatgggatttgttctgctttgtaaaaatgggtgagatttaggtctgtggagtagagagagagtagcaggcaggagaatggcacacaggcatgagtactgtgtccaaaattatatccgtggaactgtgagtctagtttgaccaaagtgcagggtttatgcagagggtgtgtgggagatgaacatacaattgctcaggcctgactgtggaggaattttttttttttttaataaccgtgaactttatcctgaagtagcagcagagttccttttaagcaaaggaatgatagagtaaaaaaaaaaaaawatatatatatatatatatatatagtattttagaaagaaacaagtagcaagagtgtgtaaaatagcctagtggtatgggaatttggaagtccgcagacacactagttaggaaaatcaggggataataccagtttgtagggaaattgcaaagtttactcttctaaaccttaagaaaccctttttgttatggaaattttcaagcaaatgaagaaaaaggttataatgaatcctctagccatcaacttttctgccattctttttcatgtgtctcctgctacttcatattttcattttatgaattacctttttcttttgagattcacatgcagctgtgagaagcaatacagagaaatcacttgcacccttccaaaatttcttctcatggtaacatcttgcggtattacagtacaaaatcacaaccaggatattgaccttgattcagtcaagatacagaacattccatccccaggagcatccctggtggtcccttgtcaggagtcatatccatttcctcctggcctcaccccatctaccccatcttcctggaagtggaatccccctactttttctttaactagagtattttaaaacaaacattagacagcataccacttagtctgtaaacacttcattatgcttctgtaaaagatagcattaaaaaaatccaaatgccattatctcagtcatgttaataatcccttaaaattttttcctgttgtctaaaatatatctttttttactgtttttcaagtcaggatccaaagttcacaactgccttttgttgacgtagttyttaagcttcccttagtatagaacaataccccctgttatttgtcaggccacttacccgttgatgaaattgggtcmctttacccataggatttcccatattttgattttggctgattcttaccatgtttccaaattatttctcttattgcccatatttcttgtaaactaatatttagacmcagagactcaattatatttaggkttaawttttttttttttttttttttttttttttggtaaaagggatacactggcagtacattgccatcacaggaagaggatatcagccatttcactctcagtgatgctaagatcaatcagtgggttcaggaactgtcatcctaatctgtctatcataaagttcaccatcagcttgtcatctattgttatctatcaaagagttttgccaaagtctattattgcattaggggttgccaaggagtcgttttccaattttcactctttttagctatgatttttagaaaagagacctttccttcatcccaacaaatacatgacaaacgtttgagtatttgcctttatttgtaagttttcagaataataagctgatgccttagcaacccttataggatgtagtagtggttgtttttttggagagtatcattacgaaattacttaattatgtttttatgtattatgtgtttttccaatacgttgtcatcattcttcttcytatgtttatattgtttcatctccaaccattggaacctcttccacatggtgtctgycttcacatttgttatgagccatgaggttttgagagcttccttggttttaggaacaataccatgtcccaggatcatttaatgcatttcctgtccatacctggaatcagagtcttggttctttctctagagtcttggttacttttaatgggatatgggatttatagctcatagtctggatgcacagtccaaattcattattcaacatgtgcctttttattaccgtctatgattcaggacaatgtagtaataataatagtaagaagagctaacatttatatgtgttaggaaagttttcagtattttacattcagtatcttattttatcatcatagtatcctatgagcaggtatcctgttattcttactctatatctgaggattgtgaggcacagagaagtcaaataaattacccagggtcatatagttattaaatagtttgagatgggacttggacccaggaattttgattccaaaaaacaagctcttattggtatgccacactgcctcactatctttctgtagccagccttgctgaatcagatgttttaaaaattttagtagtcttttctttagtgggcttcaaagccatcaagtaagttaaccaatgaaccatagtctatttaaaagctgaggtatggtgagcttgtggggacaatgcagcagtggttaagagctttctgacttttgagccaataccacctgggcccgtaataaccttgctgtagccacgtaactaatttgtgtaataccgaacaattaaactcttctattgaaactcttcgacaccaatgttaaattctatagacataaaaaaaccacgaggaagaaaacaaggagaaaagtcattgtgtctctgatctgttcatagatgacagtaaaaactatagtttgtagtgtgtggatcatgggtggcaagttttagccatgatttggaggtcaatatattagagaattcatttaagacattgggaagtgactaacggaaaatttggaacataggtggagaatagcagagtaaaatgtttttccaaatttgaggatacacacacacacacacacacacacacacacacacacacatacatacatatacacatatatgtatatgtatctatattctatcatactgcttcaaaataaataatagagaagatgttcttaattgaattcagttcatgttaatttaactacattcagagatgctattgtatacagtaggaggtccaaagatgaatccaccgtgatccatttccacaaagagtatactcaatagtggggaatatagctagaactatctaagtcactgggcagagtgtttgtggattttgaaaaattcagctgtgtgtaaatccttaataaaagagtgcctcctactatctcggaaggtttgctttttggtcagtatgcatctttgggagaaacacacaaaggatggtgagaggaaggggccagacaggttggttgaatcagccatggtcagcatccaaggtggcctatctatccaaggtggagagtggtcagtgctacctaagatgtataaacacagtgtgaatatgaagcagtacggagcattttcggtcatggggatcagggtaagctaaatagaaaatatgccatttgtggtaggccttaaaggatgtaggcagtgtcagtgaaacacgggttgagaaggacagtaaaagttgatagaactaactgagaacagttaagatggatctttaaataaagtcagctttatttgggatatttgtgtctaaacaagtgactctagagaggaggagtaaaggaaatctatttgagggtatcatggtcaggagacatggtttataaagagttggaattaaaccgcatatttcatttttactccacgagcaactgtggaattggcagctctgtgaaaccttgatgctaaagggagtgagggctgcttgggtaatttgctaggtttcatcacctcattatttagagagatgaagaagttattttgtagaaataaaaaggtaatggaagatagatgattttaaataactcaaatgaaaaccccaaatttaagaatcaagcctggatctgttgatatatttgaagtccaagttatatttaaagttacaaatgtcagtgtttctctttcggactgaaaatattactagacaatattttgattggacaggcaagttaaagatggtcaaataccagtgcatatacttggagctgagggattgagacttacgtgaattttctgtggggtcaagttgtagaagaccacagttgggaaagcttttacaaaacttatgtatcatgagatgacatcatttgaaaaaatattttgtacttggtcccctaaattttccaaactgtcacttttttgtaactttctcatgaatctcactgggctgctcctatcttctaaaaagaatataaaatggatcctccattctctttccttaatayagcctgttgtgacttcatagtactgagtgggaacaagctggtttctttgaaagaatgatagtgctcaatcttttattgtttygtttgtagtaacatgagtaatatataaatatgctccctgtaaaaattaaacatctcagataagagagtctcctttcaccagcatttaaaatgataagcatctccgctgtctcttcctatgatatatgcagagtttttactgtgcgtttacatgcatggaaatgcacccacagaagaaatacagaaccacttcgagtgtaagggtgtgtgtttttaataaataattcttcacataatgctttaaaacttgcctttcttagtaaaaaaagattcttggggaaaagtctgttattatatgtagacttaactcattttttaaattgctgtatgtatcccatgctgtggatatatcctagtttattgatccatctgcctactggtggatatttatattgtttctaatgttctacttataaacaatgctgcattcatttcttcatagccctgtatgagctttcttcataatagtccccctttttttggtttatctcttctggttagataatcttcttaaaatactgggaacccatgaaatgtaatagctaattttgtgcaacgaccaataatatcctgtaaattagcctcaaaattgcctgaaccatttcctttggtgaattctaaagcttcattagtacttgtgatttagtcaaataggcctggttggagctgttgggaccctgtctgtaacttttggaataagttttctttatccttctgccttcccatcctcagagcagcctttgttccctggcacaatgggagcccagcagagtaagaatgcgctttaatagactaagtccattactctctctcctactgtctaccagagttttgtccagtatatgatgggggggagactttatttgggatgacaaagaagagcgaacagatctcttctcttgggatctgttattataaccagtcatttgtgatcttataacctggaaaaatccctgaagattaataagaggtagttaagtttcagtcacagttgagtgatttacccgtaactatttcttaatagcccagcaaggagtcataagcatgatcaggattttattgataggattatttctgtggcaaggtacaattatcctggtatgaagtacaggaaaacaaaaagcctttttatttaggtctttaacaaaagagcaggcacagaatgtctagggggcgactgctgttggaatcagaagaatgcaaaaatccaagtgagggtacatacagcatttcactgtgtttttagtgttgatcttgcaaagcgaatgcttttatcaccgagttagctgcccttgatataatagagatgatttgttttggaacatagcacaagtgttacaggtttcttgcatatatcaccaacaaattctacacagtaacttcttgacataattttaacattctcgaaaagcgtgctcttttgtttaactctctcaacaacactgacccaggcaggataagcgatcctgtagattatcaagagtaggtgatttatttcatcatggtcaaaacatatacaaaatctgccttcaaacccatctgttcctagaggtagagatagatacatatttatacaaaatagagatatgtatttatacaaaaatagaagggagccatgggattttgaggtatgctgtgaaattcctactatttatcttttgtgtttgactatccgtagggctgtaagcttactcagagctcacatagatgcgtccaggtactgtaagtcaacgactgtgcttggtctctgccctgttcttgttctgtgaagtgaagaaggcctcagatgcatttggtttggtgaggctagaagcacttgtatttgctacctctgtgttacaaaaaaaaaaaaaaaaaaaaagcccgttttgtgtgtctgttccctataagaattgagttctttgcctgctctgttttcagacatcaagccttactttaatgtgtttttctaactctgtgctccccatacgtgcttgatcatcaaaatcacctgaaatactgtgagttctacgatcagacaagtttaggaaacaatcttagcctgatgcgttagatctgtctcatggagtttaattgctgacatcctgtcaaggacctaggtccatagcatgttcctgcaagcacttggtgtctggcattgctcttggcagtaaatgaattaaaactacaaaaaagttaggaggcaagcattcacttcccaaggatcctttcccaaatcaggagaggctcagtaaatgctgtgaattataggaatatttgttcattatttcaacaatgattcgagtgtacactatgtgccaggaatttgtgctcggtgttggggacacacagctgagaatgaggcattatttagaatgagctaacatttactgaagtgctcatggtgggatgaatacccagctaactgcttcatgtacctttgctggttataacttcataactgtcccatgaggtgggtagtgtcaccatcattttaaaattaagaaactgttatttcagaagtttgactgacttggccaaggtcactgatctcacaacagggagattcagagtccataccagacgtatattcctgtctctgttcatcttctgcttaacacaatctatgtgtctcctcactttcctctttctactgccatcactctgtgatagagttgcctggtaaacttttaaaaagtatccttgcctgggctttaccccaaacagatgaaagaatagttgatggggcccgggcacgagcatttttcaaaactctctgggtgatgccaatgtgtagagatggttgagaagcatttagagcattgttaattgacaccaaatacatactgttcctgccagcctcgtggtttctagcattcttcttagatcatttggctgattaaatgattaatgattccaaatcacttttcttcccttttaaacaaacagaaatctatcaaaatataacaaatactttcataatgcgaaatattcctcagtgagggacatgataaaagacccatttaactgagaatttagaaactcgaagatctattttcagggggaagtagagtcaacagtgagtgatgaggaatgacctggggtctagagcacccatgagctcctcgatctctcttttcctggtgtgactctgagatcctgagatcttttaatctgatgggaaagaaaaccttgggacagatggtagttcttgaaaatttccctcatccccggtgaacacaggtcatgtatcaacttattttttttcccaaatccaagtcaaagtaaaataaaagctaaataggagcttactaatttggatgacttagtatatgtactttatactaaagattattttgaatgctcaaagaaaaaagaatacattaaaaagtagaatagacatttgcatttcttgaggctgtttgacaactttactcaaacaatgcatgcatatatacttatataaacttttaatttaagaattctgtgtttcttgctgccaacactttgttaaacatctattatatggtcagtaatatcttgccttttaaagatagcagtctaattaatcattgactctccactaattaaatctgtttttatcttgtcttcaatcagtgggttgtgactgatccctatgacaggttcttctcaaaacatctgtatcaaatattaagagaaaatggttagttgaagtaatcacaatattgtggtctataaagtttctagaaagagaaagacaaggaaagtaaatttgggggtcactgtatttcaacaagtttgaggcacttttataagaagaaaaaaatcaaggctaccaggggagggaaaactttttaaaccattaggtctttagacagagaaagaaagaacaatgacttccatcccactstcatagtgatttaaggtgagtattatctttgcattttacatgtcagacaactgataggacagttggatcataaatttcgagtagggtcaagagtcactttatgactattactagaaaagatcattaccaaaagagtaaactaagaaaaaaaaamcaaaaaagaaaaataaaaacatgaaaaatggcctccttttttacatttccacataggtgatctccatacgaggagatgaacttgaacttggttgggcgggagacgaacctggttgggcgggagactggagcccctcagagaatttgggattcttccatttttactgggagggttggcaggtataacatgtgttgttatgtgagtccatgagagcctctggggttcttactccctgcctctccgtgtggtggagagtcagtcgcttactctgaagcactcgactgatttctgtctgtggcttatccatgaacagtggcttggaagtgtgaaagcatgagaagcatgcagtggaacagcatgcgctgccgtcatcttctacttggttctgcatgggaaagctcctgggctggctgcctctgagctcaggcatttctctctctccctacagaactccctgaaggcttcaaatcggaagaagaagagaacaagctttaaaagaaaagccagtaaaagagggatggaagtaagtgtttcagagttttattctgaggaatttccactttctttccatagtctactctgtcctatgagatctggtccaagttgatttttctgatctatcttctactactgctttctcctcactacactctaaccacaataggattctttctgttcttttaaaaaaacaaacactcaaaactaacctctgcgcttgcctggaaatgttatccccaagatgatgatgatgaagatccaagctaatatttctggaatatttggagtttacagagtaaaataaaaagcctggcttaattctctggagcaaatgataacttgagatactttcttccaagccttacatggaagtcgtgttaagagtcagccctgggaaacaaaatgtattattgggtggttttccacctcccttgccttggggttgcctttcaagccatggatgtgtatcctaacagtgctgattgcttctttcagcaggaaaacaaaggtcgtccttttgtgataaaacccatctcttctcctctcatgaaacccttgcttgtatttgtgaatcccaagagtggaggcaaccaggtgagtaatttttcatgattttcaacttagaagttttgataatttcttgacgacacaactctcactgccaattaaaatagtaccactaggatcccaagctttggaagacaccggtttctcaggaacaaggttattgtttctctgatagctttacacattacagggctgggcaaaacctagatgttctataatttatctgtctgcttccatataagactataacaaaggcacttaagaaacctaactactgactttttccttacagattttcaagaaaggatattctagaatttctcttagttcgtatgtttcaggattcctcaattcttatagttaggaggcccttcatcaacttctttttatttctttctattgcaatttagatacaaccactttcatccctatcctcagagaagaaaaaaggatgattcatsagccatgataatccctaccaaataccaccaacattatagaaaatatcaacttcttaaggtttcacttggtcctagcccaaatccaatagtacagatacttatctcatttgagaataaagaaattgacttagaaaagttaagtctaaaggcatgcctaaagtgacactggtctataaaggacagaatttgttcttgaatcctggtctttgtctcttcatccgattatcttcccactctctgaggcttcttatcaatactcttctatgggctttaattttctgttattttcttctgagtttggatgagaaaatattttctttatccacgaagtatatattttacattttgagacaagattccttcaagttttacaataaacaactggagatttgaaaccctttagtcatcccatataaggaaggtaagttgtataaataggattgacccactggtccaagatgatgttcttattactaaagacaatgggcattgtccagaatgtattaattacaataaaacttctcttatgggagcttatgatttaaatgaaatattattcttcctttcatctctgccttcaaaattctcaaaaacttgatatggtaaaaatgtgtattaacattttggagaacaaggaaaagaaatttgtgtaagcaaagaaaccatttgttttcaagtcctgcatttttgagttgctgagagatctttatggagtaatgatggcaattctaagacatcattagaggaggacctrgacatgggtttccttgaaatgaggtttaattttccctgaacaatacccactctcttgggctagtatccctatgttctatcaaaggttagagatgcagttgggaaccctgaaacatggaaatgtaattagttccatgattttggccacctgagcaccacatatcaattagtttcaaatatattttgtcatgacagtccacatrtaagatgcatttattaaatcattataagctctctttcctagggcgcacagaggctagtaagttatctatttctttaaggagctgatgatccagttaagacatagcctgttcctattccagtctatgtgtaaattattaatgacggggacttcagagattatctaatattgcttcctatttcactaaatagaaaagggaggtcaaggaagcttaaaatgaattttctaaagacatcttgtaaatgacacaaaaggaacaaatggaaaataatttaagcaacattaactgcatgtgacttctaaattgagtggctcagactgcagtgctatgatatttcagaggtaagcagtgacttgggagtgataaggaaatggtgtcatggacatggctgaaatcaaagatgggtactacttagttatgcagaggagagaagactggaaggtctgtccttttcctgctctttactgtggcagattcctgttcagcaaattcttgttcatccttcgaggctcagtggtgcctttctgaaccatttctcgagatcaatcatcctgtccactatgccccgatagcccttggtacacacttgcatgatatgaacagtaacataactgctctatgtgcgtcttcactgttggggtacaggtccaccattgaatctgtgatttctagaacacggcacatagttaaataattgtataataggattagaagaacagatgtcatgatgccgattattcattttgaggacaatatgatgagtggtgcatgcatattaagttattggaaatgtgattaaagattagaatgatcctatggaatcacgtcttcaagaaacaggatacttcaggttgaagactttggatttatgcaatggaaactagtttttttgctgtttaaaatattttagtttaaaaaatcttttggcttttgaacagaggaataatatggtggaatttaatgtgcgtatgattcagatgggaattgtgctaaaatgcagattctgcttcagtaagtcggggtgggccctaagatgctgcattcgtaataagctcgcaggtgctgagactgctgctcagagaaccatactatggttagcaggggcttactgtgataaatagaaaaatagatactttttgttaaatcttgagttttgccttttaataatttacttattccactcacctgcttttagatataaaggattcctatctccttctgtctttgaaacttaggctttagactttttttttctttttttttaaaaaatttttaacttgcttagtcttctaagtaaattactggacaatawtgccacctactggcaagaaaaatagctttttctctttatataatattttacttgtgtaagaaaaacattttgaaggaatgtattgggatgaaccgtgtaaggactgcttctatgtctctcttttaagaaatcccatattttaaaactctttaattttttttctaaattgatacattctttttgtacatacttatggagtacatatgctattttgatacatttatggcatgtataatgagcaagttagtgtatttagcacatctatcacctcaaacatttatcatttctttgtgtttgaaatatgtcaaatcttctagctattttgaaatgtgcaatatactgttgttaagtatagtcaccccactgtgcaaacactagaacctatttcttctatgtaattgtatgtttttactcactgtccaacgtctggtcatcccccacacccaccacacccttcccagtctttggtaactatcattctactctctacctctgtcagatccactttcttagctctactacatatgagtgagaacatgtcaatttttgtctttctgtgccaggtttatttcacttaacataatgacctccagttctatctttgttgctgcaaatgacaggatttcattcttttttatggtcaaatagtattttattatgtatatataccacagtttctttatccattcttccactgatgaacacctaggttgttaaatctcttcttttaaacttagcagtaattgtctctttgtttttccaacactcttaaggtagcgatgacactgggtgttttgcaaagctgtagagcttggtagcactgctgctattattttattgggatttgacttatttgaggaatcagggaccaaaatttcaactttttttattttattttattttattttattttattttattttattttattttattttattttatatattttgagacggagtcttgctctgtcacccaggctggagtgcagtgacacgatctcagctcactgcaacctccacctcccrggttcaagcaattctcttggctcagcctcccaagtagctgggattacaggcatgtgtcaccacaccaggctaatttctgtatttttagtagagacggggtttcactatgttggccaggctggtctggaatgcctgacctcaggtgatctgcccgccttggcctcccaaagtgctgggattatagcactgtgcccagccaaaaatttcaactttgaatacctccttckgtggaaagagatagtaagtgtaacataaagtttactccagtgcaatcccctcctatgtgtggaaactttcgagtactagagaaatacgtcccctcccttacacttctgtttgccttaatgtcaaaacttagatttttctttgaggtcctggactcattagcatctttctgagttttatagaatcctgtgatatctctcagtgtttcctgctttcacactgtctctccctcacgttctctcatgactttctcttccagtgacstagactttaacttcagggtaaagcaatgttctgacctctaggatgattctatctgatcatccctgagagccaagggatccagaccctggctttgcacactgttcgatgtggaatcctggggtagaagtatggcaggagttggatccttggattacaggtcccagggtctttatcagtagggtgatcgaggaagaggtgtccagtctgtggacagacacatggcagctgagtttacaccaccatctgggaatcggctttctcagactagggccacccctcctaagtcaggggccagtcacatcaaggtggggagaaggggaagacagaaagagtaaataacttcagatgagaaatttgagtcccaaaactgtttctaaataattggacaagcaactttaatgaagtagttacttttttgcagtactggaaacttctcaacctagtgataattcaaggatcattatgtttagataaaagtgcaggctccctaaggtttagagtaggcagggaagagggcagagggaagtcagtagacgaggacacttgtcaaaatgcagcctcaacatcttcttgtccagctagcctcaacagatggaattaaaacaaccaaatgatgaacctatggaaagtcctatttctgaaatcatagtattggtgggaggattgggcagctaagacccaaactagctcctgtrataggtctggttccttagtctgtagccagagcgatgcataaaaaatgtcagtctgggagaaaaaaaagctggtctgaatctcttaatgaagacttttcagtgactccttgttttctataaattaaagcctaagcctctcagcatacattatttaaaccacagctcacttcagctgtctcctctctcgcaactccctgtctcatggttcagaaaagtgaacagaatgtagctttttcatgggatgtcttgctgtttcacaccttttgtgcctttaccctgaaggttcttcatctattcgaggtggaaagaaatagttaagtctactcatttttcaagacacatttcagatattttacttacaacgccttctaatctctcaacttgggcttaagagtgtttcctctgggcactcatcctccttagcagacgtctgtatcagagaagttcccatctttggtgaattaatttattttgtattgctctccttccagtaagttctgagatcccgacggtacacatggacagagtaggggcctaatacgtatttatcaaataaatgaggcattctatttggattgtttgaagcagtttgaaataatwatttcttaagcccttcctctcattaatgtatttttctcaggcctttcttattgtctgggcagttgttctttctataatctagataatgcctgcatgatataaaccaagacttagtaacatagcagagtttcaacctacactagagttatggtgctttgatgaagattgatgagctatttgaaccgacccgttcttgattgcttctccacacccccaacaattgtcattatgttttcctttatgaataatgcatggaacttccttctgagaacaagatcatctctgtcttgttcatctctgtattctcctacctaaaactgtgcctgtcacatagtaggtgaatgaatgaatcttgttcaatccagtcactttttgggaatttgtattctcctgttgcactccctccctagtacttgctgcttggaagaataatgttcttttactccttaggaatacccattcttataatatctaaaaaagttctgtggccagtgaggtatatctacagtagcatgcatggattgggattggcatataagctgtttttttttttcatttagagaaaattagactcttgcacaaaagttgcagtttttatgtttggcattatagcatgtgataactatgagagtgctggagagttgttagtaagtgacagatgtctaaatgagcagatttaatcctactattgaggaagaaatgaattacccttctcctggtgaattaatatttgtcaaaccattcagttacatttaataaattayctctattaaagctttaaagttacttaacccagaggtaacagcagagttaatagaattcatttaagtgtgtgagttagatctttgtttctccacacactaggtggagcattttttcaacgctttcttttagatacttacatttttggtaataaataccatattttgaaaagaagattactttttaaaagatgtaatcatatcatgcctgaatgtcaatttcaacagggtagccatgcctggctatgcaagttatctttacacaattgcaggcatgttattccaatagactgcaatagaaatgtcacctctgtggccactcggaccttttagagaaattcaagtttaaggaaaacaacctctcaatgctttttatttttattttttggaagatgttagttacctattaatatttgcataatggagaggctgaagctgagctgtgcactctactatagcacaggtggaaaggagtaattaacatcaacaattcaaactactctaggaatctaaaactgaacaaagaactttctagcaagtcagttggaaatgttttataaattagttggtcattaaaataackcctgtgttacctattaaacataaaagattattcgagataatcccaaacacacttcatagcaaggctcagcgtgagaagagggaaaatgatctagtatttagtgtgtatacagatctaagtctatgtttgaatttgatrggaagcacaatatgtcatttggtgaaactcaaggattcgttgtaattattagatagaacgtgattcctaaaattatagcaagcacatgataaggcagaacttttaaattataggtttggctggtacatgcaacaaaagacctgcattggcctatgtaacaacaggagtaacaatgtgataattataagctatactttagagctcacattctcaagtgtaatttaatgagtagattaactggctgcaaaaaagaaaaggattaacggtaacaaaggtctgttttgtgccgcatactgtgctagatacrtgactgttagtgattcacttaattctcatactcaccctggaaggtggacatcctttctattttatatactgcatttctgcaaggttataaatgctcatgattactcagaacactgaagttagtttgacctcaaatctcatactatgtccagtatactgggatgactcttaaatgcagcttattagatatacaaacctaggcatattttaagaaagagcaattacgatatctactaaaacaacaatattatgagcaacaaactcggctcaactggtcaaatattatttgctatgggtgataaaatggggcatcctactgatttttaaagctcttttggtattgcttgataaaaagatccttcttgcatttctttttcttttttttttttgagacagagtctcgctctttcacccaggccgaagtgtagtggcgctatttcggctcactgcaagctccgcctcctgggttcatgcccttctcctgcctcagcctcccgagtagctgggactacaggtgcccgccaccgtgcccggctaattttttgtgtttttagtagagacggggtttcactgtgttcgccaggatggtctcaatctcctgaccttgtgatctgcccgcctcggcctcccaaggtgctgggattacaggcatgagccaccgtgcccggccccttcttgcatttcttgtttgctcaatccaatttaaaaatgatctctaaagtgaccttatgtctgctgtaatgatgatctctataaatgtcacagttacttaaaatgccccaaaaatgttcacgtgacagagaagtgtttggcttaaacaaaccagtataggcatggagattgaaaatgtcaaagtaagctgtgatcttactaaggaagttttatatatgtataaaataactgggagcctgggatacttttgcttcagttagaaaaaactatttctataaaattatattaatacttagctaatactgcccatattttatattatacagacaataatctgtacaataaagtgaaaattaatgtcaaattacataggctgactaataacttttctatatggattttcatacattaatgatagtaaaataaatattattcattaagggcttactgcattttaaacactgtgatgtacttctcaaaaattatggcttttaatccttgcaacaagtctgcaaactgggtattcttgtctctgtgttaaagaaaaggagggctgagctaaatgaaatgaagaaacttgcccagagttacacaggttagataaacatctaaactgacattcaacctatggctatccatgaccaaagcccgtgattttaactactcttctatactgcttataattagatattattttatttatttattcatcattcattcactcacttattattttttgagacagggtttcactcctgtcactcaggctggagtgcaatggtgtgatctcggctcactgcacactccgcctcctcagctgggactaaagacatgtgtcaccacacctggctgatgtttgtattttttgtagagacgggattttgtcatgttgcctaggctggtctcaaactcctgggctcaagtgatccacctgcgtcagccttccaaggtgctgggattacaggcgtgtgccaccgtgccctgtgtattattttaaataaaagtatttattttttaaatgagcagttattcttgggaaatttcttcctattattgcctttttgtgtatttattttttacagggaaccaaagtcctgcagatgttcatgtggtacctgaatccacggcaagtctttgatctttctcaggaagggccaaaagatgcgtaagtctggaaatattctccatggtccatatgtattttaggcamgtgagaattttctgcttcattatctgattaccttgtgaggtatwtcctgaccatctgtcatctaccttctcacctgtactctccttcctttaaaacttcatccaaagttctctcctactctttattggcttagttcccttcgaaacatatcttctcagctattarctcaggatacgtctagtgtgtttgttacttacgtatgtgtaactgtaggttattctctgcaaatctgtgaattgagaaaggactcattgtttttctatttcttcatgtacaactttggagatgcacattaatggaatgtaaatgtatgtctgtggagggtggagccatgtttgtttatgaatatttgaactgaaaagagagagtgtgtgtgtgtgtgtgcgcgcgcttgtgtgtgagagagagagaatcaattgattatacctgaggactctgcacaaatgtggggaagacatattaattcctgctcaatcccgtttctgagcttctcagaaatctcattctctgcttttgttagaagtgtttaaaataaagtctagattgtaggtgacccatatcctgcttctctcctttggtggagaggcacacagtggaaaagaccaaggacacttctgctgttctctggttctccgttttaaattcatgtactaggatagttcagatgttatctgataaatgttagaacacaagggtaccacttattttttaataagtaacaatatcagaggaaaaggtgatttctagagaaatagtattcttgtataaaatggataaattacttattttaagcatgcagattaggaaatatgaaaattaatttgttattttcttaacgtatgaatttcttcaccagttgagtttgctgcaagattcttcctctctctgtcccataatacatatatatatatttatttatttttattttctgtacttgattatgctaaggcaaatctgctatcctgggatgtgccattttaggagcttatttttcttaagattttatcactttagttagaccctagagagacacttcagaggtcaccgtaaagaacatggtaggacaggaaatattttcagaaaaaaaccatattttgtgatttaaataggtgatattttctagattacagcctctagcaacttcacctaagcaaaagatttagcaggggcagtgtcaatgcattttcctgagatccaagaggaaagacaaaattatcttatttcaagcagagaagtttgaaataaataaaaatcagtcaatcttcccactttgggttggaggtgtaagtggtgtgtaactgagctgagagaragactagatggaattgtagatgtgatacctgtgttcacatctgagagtgcggaagcctccccgtctcgctgaaaaagatttcttaggattaagagtagaaagtataagttagaagaagtaaatacatccagggaaaactaataaatataaagaggggatatataaggactactgattatcaattaatgatgattttcttggggaaaggggaagaggaaatgatgggaaaagaaaaagaaggaagtcaaaactaacgaggaaaataatgttgacatataatagaagttatgggaaataaaactaggacatcctaaaatcccttaaattccaacgttgaattattcattcaaaaataatgtctgatgcctacacctgttccactggtgggagtmattcttcctgtggttayttgggacctatgatagcattgtcatcctcatgattacacattttctccagcggacaccacccctacctacccatgttgtcctctgctttctctctgctctagccagtgaaatgttcttttgtttactttttcttctatttcctctacaggcttgaattgtataggaaagtaccaaatctgcgaattctggcctgtggtggggatggaacggtaggtccctgagagagaatccagttctctgccaattctatctttcttattgttttcttgtggcacttctttttattcgttgctcagtctttctaatcccctaacacatgtatatctctcatgtgaatcatagcccctaagagtaacaagggactttgttattgtccttatgaatacatacttgatccttctaatgtgtgcttcactccttcaactatgctgtattcttttgtgtgccatgaagtagggatgtggtcaaatccttaaaatgaagattatagatagataaattccttttaaaatataagctgaactgtttccatttattcttaataatttggccacagtagggagaaatacgtggacacaattgaattattatgtttttttttttactagtgggaataaaactcagaatattgagtgttgttttgccttaaagattattaattggtcctatttatgttcttttttgttgacatactttacctgtatatggggtatgtgtgatattttgttatatgcatagaatgtataatgatcaagtcaaggtttggaggtatccattacctaggctatcatttctatgtgttgggaacatttcaagttctcttttctagctactttgaaatatataatacattgttgctaactgtactcaccctactctgccattgaacattagaacttattccttctgactgtatgtttgtattcatttatgaaaaaaaggtggaattgggctgaaggttaatatcatggatatattttctcctgtttattatgcctcatcggttttctccatttggcctctacttatggtgatatatttaacaaagtaaagaattgagaatcatgacatttagattgtgttgtctggttctttttcttccggatttggaatctgatctcataggatctacgaatgtattatgaactatctttagcttttctctaatttccctaattagaatgttttattctcaaaggtagcaacaaaatcttcgaatactatctctcttagcacataagcacttaatgtagggttggatacacattatataccaataaatgcaatgagaatgaaatagaactgtgatttttattggtctctcagatactgtgtggagagtaaaaacaatgttcagttgggaaaaatagtctttatctttcttcaaggttcatattacacattattagtttataaaattcattataatgtcttacagcaaagaagccaaacctatttaacttttttaaacccaacgtttttcaaaattatttggccatggaatttttttcccccacacaataccaatttcaattgattttagtgttctagggagatcaatttaagggatatggtagggcaaaatttcccaactttctttagtaagaattacatccaaatgaaccctctgaggatggatatactgtgttcttcctaactcaagcatcccccagcttagttatctttaatgaaagggtaaactcactgtgactctttaccatacccatagttatcttccttattttagcatctacttgccttctcatatgacttcagcatctcactcacatcttttctccttttctaaacctcagtgacaaaaacagataagttgaggatgtcgtccttcctctttcttaactcaaatccacataagctatgcataacatccccagatcttggacttctttgttgccttgggtgctccacctcccaggcctccctttctccatggaaactcccattccacctctccctccctcattctctctcctttcttcttccttttcttttctttctttctttyttttttttttttttttttttttttttttgagacggagtctcactctgttgcccaggctggagtgcagtggcacaatctcagctcactgcaacctctgcctcccaggttcaagtgattctcttgcctcagcctcccgagtagttgggactacaggcacgtgccaccacagcgggctaatttttgtatttttagtagagacgatgtttcaccgtgttagccaggatggtctcgatctcctgacctcgtgatccacctgcctcggcctcccaaagtgctgggattacaggtgtgaaccaccctgcctgcccgttttccttctttactcagcagatatgtggaggaagcactgtgctaggtcatgtagtattgagatattctctgcaattagatgaatatttgaaagtatgggattccaatgaataaaagataaagaggaaagagagccaagtccacacacttgtgaaatgtataattatgggtccggagccaaagtccaaaaggaaaataaatgaaaaaatagaagaataggacagccaccagtctgttctgtcaagtaaacaaaccaaaaaaggagtttcaagaaagaggcagtagttacatttttaaggagagactgaaaagttaccattgaatatggaatttcaagaaagcagtttcaatagagtatgtggggcaaaacccagaatgatgagtaagtgaaagttggtacaatcttaataaattcctaatggccagatccgattacagtttcgaatgtctgtgatctctctgatgccattgtcagcctcctgacatgtagactacctacttctcctatttttcatatccagtcttttcaagcaactcttcattaatgatagcataactatgagtattccataagggtaactaatttttttaatgtggtaggtaccttttcctcttagggacattatctatattttaacatctgtttttacctcctctgatgtaattcacaaatgtactagtcatttacacttgggtgccccatggccacttgcattcagcatgcctaaaataaaagtagtacgtttaccctagagttggcacatttaaactaattatttttgtcagtggtaacatctgtagttaaaatacttagaatcaaaactttgcttatcttgtaccttatgtaaacccaagttttatttaatttaccttgttaggataagatgttttgtgaaaaacatggggtatatgaaatgtttgtcatggtatgtgattgattttttttgttttgttagtttagaaaatgaaacttttaattgtgggcggaggcagagtttatatagaggaaacagcctgaggaattcatgaagaaaactgctggctttaggcaagtggagtataattctgaattcaggtatatatttgacacaaggtattcagcctttcgttagtgagcacatctgtcactgtagaagctggcagaatgctgccagtaaagtgacaaagcttagggagaaatcagaaattgaatatttttcactgactgggatgaggctatattaccccataaccgtattagtttaaattaagagtattatttaaggtatagaaagtattatttaaggtatagaaagtttgcattactttggaaaaaagttcttaggcttcaatattagctactttaattgtatattatttaaaaaatacatgaaaggccaggtgtggtggctcacgcctataatcccagcactttgggaggccgaggtgagcacatcacttgaggtcaggagtttgagatcagcttggccaatctgatgaaacaccatctctattaaaaatataaaaattagtcgggcatggtggtgcacacctgtaatcccagctacttgggaggttgaggcaggagaatcacttgaacccagaaggtggaggtggcagtgagctgagattgtgctactgcactccagcctgggtgacacagtgagactctgtctcaagraagaaaaaaatatgagaaagcagagggaaacattccccaataatgcacttggaagtggaggtgaaagaggtggttctgctctcatttctgtgacctttggcaggttccttaacctcttttgagaccttctgaatctacaaagaaatgcattcagatctctaaggttcttatagctgtagcattataataatataggctattgttcaagggaactttaatgcaagccacatttgtacaattttgaattttctagaaggtacttttaaaaaggtaaaaagcaggtgaaattagtttataatatattttatttatctaaaatagtatcatttcaatatgtgttaatttataaacattgttaagatattttatgttctatttgtacagtcttcaaaatctagcatatattttatacttacagcacatccaatttggattagctatattcgagtgctggatcaccacatgtggccaatggctgctgcgttggacagtgcaggtgtagtctctttgttactggcttgcacagttcagaggctgtcacatagttacagctgtcagatggtctgatcccattttcagatctcttggctgcaataaattcagctcactcaagaatgatctcaaaccttcatgtttataaatgagaaatagcctgtctttggtcatgtgataaatttgtattttctcacttccttggccacgttgacacctattcaactcctaatggctgtcaccctgctgaaatattgacgagcacatgaactgatctcctgaggctcacgtactctcattatggttccttaaggtgtgtgacccatggtccctatctatctggctcctgactttggtgaacttggctggatctgcaagtccacctttaaccattttaattatttccaaaaggcctgacattaaattgactccagccatccacttcatgcttatttcttgttctattggcttttctagatgaaaaagcatcccaaatggtagacatccccatgccctgactcaccacagccaatgcaaagaaggaagtattattttcctttaattgatagggacaatccctcatcctaagcccctttcctcattcatcctcagcctagttatatttcatcctctctcactgagtaagcacacagtgtaccttcagtgtggattctatattgtttcaagaaaaggtcatattctgatttttatcttgatttcttttgggctaattttaagcacatttcttttaacacatgttggctttattaagtgcaaacatayattaaaatatcaaaaggaagaattattgtgcacatattcaaaagggtcccccagtcatccaatactgtgtggtcattttctttcagagctcagcaaaactcttgttttcctttgatttccaaacgtgagtgtccttcgctttttggcctgcatgtactacaaggcagcgcaacgtgcatctgttctcttggaagaaaatatcagtttgctgtcatctccacccttcagccaccccttatgttagtatactgcagaatgaaaatattgctcaaaatgcmcttggtaaacattcagtgacaactaatgctaaaaacggacagatggtggcagcattgaccagctgctgctgtgcatggctgctcagggacaaagcggaggacctggtgttctcaatctgtcagccctgcttttcctaggaaggaaggaaagaactttgcaagctggaaaatcattaggcccaatcaggataactttcttcagttctggtggaaaatataccaagtgcaataagttgcagttaattaaataatttaattgaaagggtgctaggtgagctggtggagatgatttgggaaaatacgaaagccgtggcagagttcctgcccatagaacctttcaatgtgcagtctggacttcaggtggaaacgggttccggattactgtaaagacagagcttccagtaacagctttaagatcttttgtaaagtttttctctaaggacaaagacacagattgtttcccaagatttttaatgtctcctgctattgtaagtgtgtatttgtttccattttgttttttatagccccttttttactgcagggaacctctgcttttactgttctttacagtctgcaaaagaaasgctttctgatttgatggcagctgaaggtggggctgatttgcaaactcagggctcaactttaagtggagaaatgggaagagggcatttttcttctaggaaactgggcctttattgaggaaggttggaaagaggtagcaaaatctagctgagtcatagtagctaatgttagtttagcatttcctgtttgtcaggcactagctaagcaatgtctacacatgagttgatgaaacaactctaaaagtcaggcattattattactcttgctgtacagatgtgaggggagcttagagagattaaatgacttgcctaaactcacccagccaatttgtggtggagctgagctccctgccgctcagctcggtgccccacacttctgygctgtgctgtcttcmgggaatgctggctgttggggaatgctgatagagctgctggctgaaaaaaactattcaggagctgtggaggggcgatatagacccacctcagccagagaactattagcctaatattggttgtctgtgggagaatttcaagacaaaacaaaatctgtgctgtgaaaggcaggaggcctttgatgactccaagggtgatggaatgatgaaatgcaagattttctgcttatattcaggagacaatgacatatttgatcatttggctacagaaaaaaggagaaagaatctatttatccggttcataaagcaaattgattgatgagaggcgaagcacctttacattcacacactgtgtacttgtccttttctgcatagaccaagggtaaarggagaagagatggtgagaaatccaggcaccctgtgggctctgcctttgtgaggaatcgtagctcagtatcacgagaactcctgacaaccttctctgagaaaacaattaggaacacagcctagaagatttgaatgagggctgttagaagacgcagcatcagctggatgcagtggctcatgcctgtaatcccagcactttggcgggcggatcactttgagctcaggagtttgggggcagcctgggcaatacggcaaaagccgcccccatctctacaaaaaatgcaaaaattagcctggtgtggtgacttgcacctgtggtcccagctgctcgcgtggcggaggctggagaatcgcttgagcccacgaggtagacgcttcagtgagctgagattgcaccactccagactggacaacagagtgaaactctgtctcaaaaaagacaaaaaaaacaacaacacagcatsgattcatagaagttgtgggatacgtcacgtacttcagagtcatttggaaattgtttgtgttccatgggcagtgaattaaccccctaacgttccatctgttttagtattagcattcctcctgcactgtggaattgtttcttctttgcaagctcatcttcacaggaagttgttttatttaatttttacttttctatctctgaatccctttggtttctagtaatattgaattgttttcaggactttcagatgagagctgggtttttctatagattcctatggctccaycctggggagatggcaggggtatgtcactgggcttttgggaagtcgggttgagcacttaccagagtgaggctttctgggcttctttcagccmtagtacgtcccacctttctgtgggccatgacctcagactggttttcacattccttcctcctctcttcctccctgctatgaaagagccgtgctccaggacagcttgctgtcagtagggcacacacttttatttctccattatcaggcaagccaaaatcccagcttcctctgctatttgcaagaccaggagccaagctgatccaagcctttaccccagctctgccactttgtattttttttctggcccattgaagctgcgtcttttttttttttctttctttttttcttttctatcattgttgtgtctgagtgaaatgggatattgaaagtgtaaactcatagcattttctttacccagaaaagagagacatatttcaagtgagcataagaaaaatgtctaatttaaatctgcctgaaagaaaacgggctgacttgggagcacaaatcataaaggagaggttgaatgattgtctcttagagaagttttaaggagaatgccttcttccttctttggaaggggtggtgaattagatttctactgagttctctggtgggtctgtgagtctggctctattcagggctgttgtttctgcagttggtgatcccagatgggtgggctttttctgagtatttatgtcctttttatggcctttaagaccccttcttgcagtttattagaactatctacttttactgtgtttaatctgtgcttttagcagtgcagaaacaatgtcaagcacaaacatcagaactaatttagcatcaggcatttttatttggacttcagtagccagctttgttggtattgcacgtaaaagaagagactaaagaagctctgggtcagaatctaaggatctgtctgggagtaagttccccagtttagggaagtggacagactttttgacatttataggtctggatttttagttaccacatygggtgaaccatgtggtctgcctttttagaagatgaacacaattttagacataattggtagacgagcaagttttacatcctggtaagtcacctttgtggaggagaaagaattttagttggaagtcaggagaaccaacgttaccatgactctgacacttctaatcatttggtcttgagaaaattccatggtttttttgcacctcagtttatcaatctgcaagttcactgaatttgattaagcaatgtttaaggtttcttcatctccacaggttccaaaaatcacatgccactgcttccaggagggtctggccatatccagaagggggttgagttctttatttaagggttccctataccttagcagttaaggggttggccactggcattaggcattcctatttttgaatgccatctatatcgtgtaaactgtgtgatactaaggaggtcacttacctttccaattctctgtttccttatctataagatggaaatgaaaattacattaatatctgtcttacagataatgttttaaagtttaatacaataattcattaaaggactttgctcaggcatggcacatagaaaggcatcggtatgggcctggcacggtggctcacgcctgtaatcccagcactttgggaggccgaggtgggcagatcacaaggtcaggagattgagaccatcctggctaacacggtgaaaccccgtctctactaaaaatacaaaaaattcgcccggcgtggtggcatacgcctgtagtcccggctacttgggaggctgaggcaggagaatggcgtgaacccaggaggtggagcttgcagtgagcggagatcttgccgctgcactccagcctggacgaccgattgagactccatctcaaaaaaaaaaaaaaaaaaagcatcggtatgtccatctttgtgttactgtgaactcctggagagcaatctttctaccttatctgtcacagcctagctcatttatctctttattttgattgcttagttctgggttttatatgaagtagtgttcaataaacaaatgatctagtatttttgagaaacatgactcgtacaaatatagaatgaatacatgtcaaaaaatttgcttagctctttaatgagggagcctgcaagatagtaaagctgatttatcagaactagagaaaaagaattatgtacttcgtatcaaaataatttttctaaatttgatgcaaaactgatcaacgtcctatgagagaataaaactataaactttaaagcaatcatctcttcttgacatttgtgtctctataggacagaaatctatgttaacctacagttacacaattcttaggcctgcgaaacactattttagtatgacattataaggacattcaaactcctttttgccatttcaaattttggtcaatttttctaattagttataagactaaacccaaagtattatttatcttagaaaaagattaaacagggatatgattctagtatataagtatcartttcctgcctaaacttataataggtactaggtctgtccataattatgttttcataatgtttcattaaggaaaatagagggatattcaggaaaacactatcaatttccaagatgatactatagagggcaaccatttaataagtacttatatgggccatgtaccatgttaagtgctttatgtacattttagtttaattagtaaacaatcgtgtgaggtacgtattattatccccattttgaaaatcaagtaaatgagtctcagtgaggttaaataatttagtcaaggttatgcagccagcatgagtcagaattgaaattcagtcttattctgagttttatattccctcctatgccctgttatactaccaaagtcttaaactctgagaaatttacaagkgtgtttctagttaaacgcacgcatgaatgggtttagttttgcttgtgtgatagaacatgtgcaaaatggtcctttttcctttaaccattttgtaactgcctgtgataagcgacctttctgttccctactcactgaatgaaaacatacatgttttaaagaaaaataaaaccattctgtttagctcttggaagcctctgtttctcaaactgttttctttgtaacttatttatctttcttatatctcttctggcccccgatacgcctgtaggtgggctggatcctttccatcctggatgaactgcagctgagccctcagcctcctgtgggggtccttcctctggggactgggaatgacctggctcgaactctcaactggggaggggtaagaactgctctcggggactgcccatatcatcaaacaacaaaccggattccagatccactgatgttctaatggaagaggggggtactgctgctgctgtcccaggcataagttagagttgagaatcaaagtgcccttgagcccttatttgatctggtagcttcttcagtttaaacttaaaatcagctagaagggaaaggaaagcttggtatgagagaaatatagtggttagtacacaggcctgcgsstttttgaggtatccactaaaagacagtgggtgagtttggcctcaagtctgcgtgcaaaaggatcatacagacttcagttaatccagactctcagccccagctaggatagcacatctggttcaactttacacaccttacttgggagagttatgactttttttttttagcattttattttgttttgttttgattagtgtcatcagagctttggctgtataggtacttacctgtcctttccacaatgaagccaacttcaggcaagcttgggggaaatcgttctgcagtcactaaacagccatttatttacttacgtatgttatagtactaagatagtaagaaggcgcaatatatatacacacactgtgtatatatacatatgcatacacatatacagccccaccaactttttttttttcttttttgagatgcagtcttgttgtgtcgccaggctaaagtgcagtggtacgatctcagctcagtgcaacctctgcctcccaggttcaagcaattctcctgcctcaaccttctgagtagctgggattacagstgcccgccaccctgtgcagctaattttttttgtatgtttattagagacagggtttcgccatgttggccaggctggtctcaaactcctgacctcgtgatccaccagcctcagcctcccaaagtgctgggattacaggcttgagttactgcacctggtccccaccaactttttatctgctcatatgagagcattacrtgggctgggctctgtgaaaattatattcagatatttagtagatgctagttgacctttgggcaaattaaccttccacaggtctttttttaaagtaggcagtgtagaaataaaaaacgtatttacatggggcaactaaggttatcatcagtgttaacttctcccttccaaatcagagccttgcatatcctattgaggacagtctatcgtgctgtcagtaatggatcttcaaggattaagtagctccctaacagggccattcctcagtgagacttgcttcaggtcacgggaagaatggtgtcttccaaggaggtcagggagaggtgattgagagggagtgttaatagataagcattgtcaatccaatccctccttgattctttccctgcctctccaaacacatttgttttgtgtttcccccaaattcctccagtgagagccatggggagtcctgttttttactctgataacaaagtagccatccagcctccagtatgacccttaatgtgtaccggtgactattggttcttgctgctgacaaaaaatattcctcagctcaaaccagccagaactagtgtttctatgtatcttacttatagtattgtctcaaattctaagtacctcaaggtaaaaaatttgctcttcaaaccttgctaattataaaataaacaatataacggcttggctcttccttgcgtaaaatagcattggcttcactgttctccactctggacagcaatggatatgttctctgattcctcagggctacactgatgaacctgtttctaagatcctgtgtcaagtggaagatgggacagttgtacagctagatcgctggaacctccatgtggaaagaaaccccgacttgcctccagaagaacttgaagatggcgtatgtaaggttagagagttttttgttctgcagaaaggagccctggagcatctgcctgagctacaggaaaaaaaatcctggctggagagtcatgtgctgatgaattcctatgagataatgtgataatatttgagttgatggctactggggctatgtgtataatattaccacctaatgattctgccccatagacctctaaatacctagattccgtacctgcttccaaagctcagggagctcttctctgtcttcaacttctgcactagaaaggcatgtattttgtcttaatcattcatgttaatagcaaataacctatgagaagatgaaaaaatatgtatatttgtaagcattgggcacttgttctttcagtagaaatataacctcctgagatttctggcctgatataaaatatatcttacgttgaagaggtattaactatgccagtgttaccacttgggtgggacttgaagatacctcaataaatgttttgacttcatgttatttaaaaaaaaattgacttttattttagattcaaactgcatatgtgcaagtttgtttcatggatatattatatgatgctgaggtttggggtatgattgatcccatcacccagatagtgagcatgttaaccaacaggttttcaatccttgcccctctccttccctctctactctagtggtccccagtatctattgttgtcatctttatgtccagactttatgttttcttttagtgattgagcttttatttcaaccgaaaagcaaaccaagggatatatgaatagttgtaattagtactgtgagccttcagttggtcctttggttctaaattatggcctcaatttcagataaatttggtaggtttctgagtagccacttccctcatattactttccattttccttctatgattgaatttttaaactctgtatgtgtaagaatctccaggtgtgtttgttaaaatgcagattacaaggcccagtcaccagagattctgattaagtaaatgcaagttaaggcccagacatctgtactttaaatggtatcccaattatagtgaaccatgccatttattgaggctaagattttgtgggtatttccatcttataatagattaagccccatatcattttagatttagatcaaaccaacacccatttattagcatcgtgatcctgatcaatttaattacatatattataatttaatagattttcaagtttctaacttggctaaattagattaaaacatgttttactctgtctttatggttttttcacctaaaccatgatcctgaaattctagtagatttctagtagatatcatgattgctcagctgaattcaagtttataatgtcacaatgttgtttaaacaacaagtgtcatcttgagatacgaagcttttttttaatgtgtttgacttatagaaattggatagaaaacagctaaagtataaagaagagtaccatatggatattgtaagtttcttttcctactaaacttggaatagttagacgtgcaatagaaatccatatttaattctctttccaacagcttaagaaatggaaagacttcttggtgtagccagggaacaccaatccagataattaaagggtttatttaaaatgggtttttaaagagatgtatgggaaactggggcaagttttcctggaaaatataaataacttaaaaacagactaaattgggatatgatttaggtgatggtgaccagatgttctccttagctatcagtagatgttaagacatgggttagaattgtggccaaaagaacataaatggtagaggaggtgaacatgtctgtgcttttggcaggatcaccaacccatgctgtcattactaagaactggtattttgtttaagtgcaggaactggatattctcaaataagaaggctgaagagtaagacatgattttggcattgttctatgtgtttagtttctctctcggtccttcatttagtggagaccatttctaaggctcacttggactctgaatcattacataggctttgaatcaagagcttccatgtggggtcattccttactttcattagagaccaagccaatccaattttcttttttctgcatttatatctgtcttgttccctctcttatttcacttttttcttaatgaaagraagttctccttctagtgaaacagaaaatcttgctaatcaaggggcatatgaagcactgtaaaaaacatacttttgaaatcttgagggttaaaacacttatctctcagagaagacaggtacagttcaatttgggacacaaaccggataattagctggaaacatttctcgtctttatttactttaatatttaccttccacttgagtcgcagaaggaaaagcgggagaaccagccattcccactctcacattttccgcatgctttcttaattgttctaacatttaactgaagcttaaaatcacattagttttgcagttttaatgcaggatttgaggctgcagagttctcttcattcagcttgcagtggtaacagccagagacccaaaggactctaggaaggaaagttaaagcttccatgtgtatctgtgtggctgtgttttcagatttcatggtcataataaagatataagggttgatagattaaatgagaacttgaataatagtaataggtagttttgttgttgtttttctctctaggccagcaataaccaatgggtcacattgccctattttttatatgacttttgtaaaaaagattgtgtgtgtgtgtgtatatatatatatatatakagagagagagagagagagaaaatgggtgatggataaacaagttaaatattcattttacattacagtattggtttgctgaatataaattcttgaaaaacgcacatccactgattaagttggttagacattatctttacaactggatttactttctaggtttgcttagtgaattcttctctgtaactattgcaaatatatatccttcagcataacaagttcctattattacagcatctataaaaatgattctcatttaataatttgtatttgtgacacatttcttatactatttataattcttgagaaaattacttgattttagctttcactcatgaattaatccaataatttcctgttctttctacataagcaccctccactttgagttgtggctgatctgtctcctagggacttcttcagagataggggtccagctttaggttttattcttctctttctgcctggccacacaaaattttgcctctgtctttgtttatcattgcagctccctctgaatgttttcaataactacttcagccttggatttgatgcccatgtcacactggagttccatgaatccagaggtgaggacaacgtcccatttccatctcccagggaggaagtttctagcaggtgttttgcatgttcccttttgtttgtatatcacttacgcgtttacagtgtgcttcagtgttgtttcattttaaccttcaggatgactctgggagctagmcaggacaggaacttcttataaatgggaccctgagacctagttgttcagacaaatgggaccctgagacctagttgtccagggtcttaaagacagtaaagggcaggactagatgtgtgttccaggtcttgggattgttaatctttatgttctactggaagatttgaagtgagtaaaatactaagaagtgatagagactattactgaagtcactaggatattctttagcttcacaaaacactattaaagtgcaatactacacaaccacagccattgaaatatggtagcaaaaacaaaaatgtcccctctgtttgtataaaagaaacaacaggcatcttagaacaatagaggagctataggtagtttaggttgaaagcataggatgtaatggtgatgggattaattaggaaggtactagggatccccactggatgatacagaggtgtgaatgagaccatgtagtgatttcaggtactaaaagagatggagtcaagattaggggaacagaatttttgaaagagaagatgaaataatgatatgctattaaatatttcatcaacattttctcatgccatttagaactgataaagtttatgggtttgacttatgttttgtagtcccgattgatctctctctctctctctttctgtctcattctgtctcttaaactctgttcttattaatatagctatactatatatccatgtctatgcctgtatctatatctgtacctagtgccttctgaatatatataaccagaaccatgctaggatgtagattgttaagagacttgtgagataaagtcataaatgagaagtactttacttttttccctccaggttatgtaagaaaggaagtggtgtttagaatttttgcatactttggaatttgaaataacagagcactaaaagctagaattcagattttcagattctggtaataacatgaaaattctgatcatgcacttatgcactagaagtcaagagtgatgctacaggattaaaaaccactagagtataaaatacaagtaaggaacagatctttaaagtctcttactggatccagcaatgttagcagactttgaccttcctggtttcccaaggttttgagaggacaggctctgtaaaggtcaaattctgtgccaagcaggaatgatgctgtttgaagagaaagccatagtttggtattcctctctgattggccagaaaaatcacagctagaaggcatgattgataacagaacctcaaatatcctgagtcagaaacactaccactttccgcctccctgccttagacagttcttggatattaggtattcagagggacttaccttggggccaacatttatgacctgttacccttcttatatttaaggagagttaatttgggaagtacatgggggattttattcttcatttcttaccccattttttatctcatattctttagcaggatccagatcctgggcttcttaataaaataccccaaacttcttaataatacttgtaaagtaacacaattatcacaaatacatggatttccaaaaataggcatgaaaagaggtctaaatgaataagtggccaacaatgagctcattcaatgagctcaatgagctcaagtgagtctcatatttagtctaacttatccggaagtttttctaatgattcacttycttgaactatgatgaagtttctatgcatcagagtgagaagggagcagggagagacccttacatgggaagaccaggcttagaagaaaattcttttggggaaagtgatttttctcttttattttaagctgtaggactattttagagtggaatatgcaaattgttgagtgtatgaacatgtacatttatatgtatgtgattataaaacaattagttaaagatgtcaagcattaatctttgtatagtttattgctaaggcttattgtgttttgatgcagtatgaaatggaattgtaaacatttcccctgcatgtaaatcagagcctttgaggaaaatcagccactgaagggctgttaagggagaatttatgttaattggaaataataggtaaatattcatgcaggtgggatagaggtggtaaaaaaattaaataactataagatattggaaccagattttgctgatacacttagaccagaggtatggacttttcagtagctgttattctgctttttttaaatagtaaattaaaaaattatttgtctatgaaatatataattaagcaaatagcctttttttctttctttttttttttttttactgtttctgttcatttgtattttccccctatttttaactagttagtcaagaaatcttaagctaagctatagaagaaaaaacaggataagcaagaccagrtttttaattgtggcaagcttacttattttgtcagtagatagtgagtggctgttctcaaaccaagaaaactcayagtgagactttaaactgttttccaacacaggcactgtctgcggcttcatggatcacttgccataaaatacctaaagggtaacacaaaggctcatgaaagccattgtgaaaaaaataagcttggatagtagaatctatgaggtattagtcaagaaaatgtaatacttttaagttgagaattatgccaatacatctacataaaaataggcaattaatataaatctcattaaaggagaatttttaaaaatttaactatggaaagaatttttagcacagatgtaaatatagcccatcaaatggacacttctcagcataactacatatattgtatttcttttagaaggaataattaaactggcattaattcccaattttatatctactttattccaaacacaaaycaaactcaaaaacatgtttaattacatttggaagctgcatacatagcttacggaagtcatgccctrtgaaagtcaaagtaaataatcgcttctccaccttcttccaccttttcctgttatctcagcccratatccctggaaaccctccaatttttacaaagcatctagagtgcctccatctttaatgtgcttgagaatcacctggagagctcccctccacagatgtatagactccacactcaagtcattctaattcagtagatctggctagggcctaatcatttgcaattctaacaagctctcagctaatgtcagtgatgccggtttggaactacacatttatagtcctggattactgtccctgtagcactgggctactgtactaactggcctggaactgggggaaagatgataaccaaaccatgggatctattggatctgtaggataggagggagctggggaggaagtaggagtgctaatctaagtcgctacctttagtgaggtctccataacaaaactacttttcctctttcacagaagcaaatccagagaaattcaacagtcgttttcgaaataaaatgttctatgcaggggtaggtatacattttatttcataattactacatattacttattgccaattcactgtgtatcataaagttgcaaactacatgagaaataatcacatatacatctcatttatatatgtctatctatggttactgtttcatggctgggcttaagaatgaaagtgaggtgtrtttcttaagttagctgtcagaaagagagttggtkttcctcatctctgagcttttaagcaagccccgaggcttcatgttgaacaagagaagawgctattcaaaaagggatgtgagaaacaaacatcaaagccagtgtaagaaatggaggaattgtgtagactgaggatgtctgaagaattttaggtaagaacgtagttttcaccagggtgcgcacattgacgtttggattagaaactggcagaatatggggtgtttttcatggacgcatacgtgaggttaaagggagtgccttctttttccttcttttgtttctcaggcacgttcatagtagtaaatagagaatgaaaaaaaggcatccaaaatatcagtacagtttaaatttatgccaatcgataggaggagtttaaataaaaggcgtttgggagctgcatacgtagtttatggaagtcaaaccctgtgaaactcagagcaaataaggaaatcttagtggaaagactgtatcagcacttaatggacaaggcaagtgttcagaaaaggttgtcaaaataaaccttccaatgaccctcagaattgtctatttttcactctcattctgtgttcttaaatttatagtgaaactgtaaattatagtttggaaacaaagagaaaaatttcaacttgacaactactgcactgctttactttggattctgcagaaagagaacatgtttagaatttttgcatactttggaatccttggaatctaggatatggaagcaaggatttggtatcaccatgtaattacgaatttcttcttctttatttccctgtggtataggcagctttttctgacttcctacagagaagttctagagatctatccaaacatgttaaagttgttgtaagtattgaatatgttgatttatttmatttgaatatgatatgactgccacaaaaaactcccaaatamttagtttatatattgaatcactggactgcatagaactttrgagatcattttgtgtagttcattcaacctacacttattatgtgtcaggcactgtcttagttgctggggatgaagataaatgaaaagactagtttcgctcctgaagraactcacagttcagttttgaagaaggtcacataagtcacttcagaacaataaaactgttattcaaccgtgtgtataatatggttgtggcacaaagggagaagtgataactctgactatggtggggtcaggaagacctttataaaaaaaaatgatgttagctgggtcttgaagcataaatcggtactctccaaacaagtatctttattccaggataatctgaggaggatatttattccaggataatctccrttttagaacgaagtgttgatttcattattttgtggtgactcactctcccacctggtcaaggttcctcaccactagatggattttttgtgtatgtgctgtttcttcctgggtctctatatcaggttgcggaaatatactgcttgggggcaagggagagagaaatttatctttctcaaggtgacacattcaaaaatagaataaaattaggtattaagaaaaacattaatgtttccttatagtaaacaagttaaaagaaggaaggaacatgactttgttgcacatagtcgtataagtaaatgacagaatgagaaagagaaaaaagatatatagatggaaaagaagtgatgagaatatagcaatgtttgaatttatcaatgcttgaatttatcttattctaaagaataagaataattttgatgggccaggcgcggtggctcatgcctgtaatcctagctctttgggaggccgaggcagctggattgcctgagctcaggagttcgagagcagcctgggcaaaatggtgaaatcccatctctwtcaaaatacaaaaaaytaggcaggcgtggtggcatgtgcctgtagtcccagctactcgggaggctgaggcaggagattgcttgaacctgggaggcagaggttgcagtgagccgagaccgcaccactgcactccagcctgggcgacagagcaacactccgtctaaaaaaaaaaaaaagaaaaagaaaaagattaattttgacaagagagaacagaacaaaatatatacatgaaaatagagaaaaatatatgatcttaagctaatgagatatgaagaaatataaggagcakgaaaatataaaaattaaaatgtgtaatcaccagtaaarcatgtataagacatgaatctcctaaatcagttgaaacaagagacaaaggcctttaccgctgctattagcaacacttggcatccctttcagatgtttcagttctcatacaataaaaatataaagcaagtatcttttagtggtggagacgcttgagactgaaatattgccttcttaaagctagatacaagaacacagggcccattgaactatgaggattattatttcaataaaatcgtggctattaaatttaagtagcagcaaccttacattaaacttcccctgtttcttcagctgcctgcagcctagcaaaaattaaactttactgccctttccagtgtgttttgcatttacaggcgcatccacagtacctgccaggagacccagtgcatgctgggtggtggccatatrgaatggcagtgtactgtgcragtcaccggattgatatcaaactctgtaacttcctaactgctagagagttttctctctcatatctcagtccccttgatgatacatgtctcatgcatgggtgactttatagtagagtctaaaagatgcttgcagagaggccaaaatggcagcaaataactaggaaagatgtgatatcagcctatatatgtaatattaaaggtggaatrtttatataaattatatcttatgaggaggaaaaaaatcattataactaggtgtaaacatttgggatttagttaggtctacctttgctaggtatatgactttggggaaatcatttaacctttcagaggagtttgctttcttcatctgtcaaataggtgtaacaagacatgtctttgatgcaatggtttttgaccattgtgctgtgacatagagagacacaaggatacttttgcaatgacatcattctatgttttcctgagtgtgagatgaaaaggatggaaggttagtgagagtgattagatgtctccccaacaacagagcatcttttctttgtcagagggtgaagtcagtgtttctaatgcaatagctagtaatgtctcatagagatataaaatatgtatttgaatattagactgagaaaatacaaaatgacagtaaaaacctacatatagccattatttgttccactttccatattttcttcttgttatttatcagtatatgagcttatacaaaggaacatattttggatgcaaatatgtccctttgtgtgtatttgaagttgggaaaaagttgaaaactgctattctaaaggaattgcacagtttattgcaataatatataaaaaaatctctgtaaagcagtatacagtgtaaggcmcacattttcgtatgatttgatgagttcccagaatcactaacatgtttcccagaaggaaaaagtagaaagttaaaaaatgaattctgttctaaatacaataatatttattataatctttctgcaatgcaaccataatgctttatacactattaatatatcacatcctaggttttaagttttagttgcttataacatgcaattttgacatttacaatgtctacttttttattcattggcatagtcatttataactcatttcaagttcttaagtaagttggaagatgtttgcttagtagttgagagtactagaaaaacatctttaatgtctagaattttattactaagttatatttgaaaataatttgtttatttaaaattgtaagatttcttggaaacaattctttgagaatactcatgaaaattaggctgtatggagatcgactgggaaaaaaaatgcaggtgctggagacaacctgaccactagcaaaatcattatacttagattgaaactgatcctaaagaactctttcagaatttgcagggagcttggggatgctttgctcctctctccaaatgagaaggtaatggggaaatcctgtgataagggtataaggaaagcaartaygagagcargctttacgcctttgacatcggaaagtctatagtcatgactagagttattctcttttgacttttgtcaccagtgggaaatgagaaaggaacatgaaagacttttccttgatttatcaaaggatgatacccttgcagaaagcgctagcagatcagggaagccatccatgttcgagggttgttgaggccaagctaggctgagacccttgattcccaggtctaaattccaggaagacagtgaatcttagaagtctaaagtctgaatggccrggcgcrgtggctcacgcctataatcccagcactttgtgaggccaaggcgggtggatgacctgaggtcaggagttcaagaccagtctggccaacatggtgaaaccccgtctctactaaaaatacaaaaattagctgggcgtggtggcgggcacctgtaatcccagctacttgggaggctgaggcaggagaatcgcttgaacctggcaggctgaggttgcagtgagctgagatcacgccattgcacttcggcctgggtgagtctgtacaagattaagtttctaagaacaaaccacgaatgaagataatactactgtatgatagatatcttttcaaaagtttgcggtacatagactttttaaaaagtcttcaaaatatttgacatttgcaaaataaaaattgtctcaaaaaacgaagaaaataaatcattatatttgtgacttgtttgaatcagataatgatggtggtgaatactactgctttaacttgaggcttttttcttttcattcttttaagtgttcataaatcttttaatgttgacaccatcagtctagataactaataatcatccattgttaagaatgataatatttcctttgattgtgagaccagagaagaaatcattttaatcaaatggaggttttgttcttaccttaagtgcgaacaaaaccaacctctgtaccctgggtccagtaaagctataaccagaatatatttttaatcactgtgaccggcattcacttaagcagagatagggcaaggagaaagagmccatggtgtgtactattgtcaaactagttatctttcataggtttttagacttgtgactacttcaaaaccccttttctgttttcattgtttcagtgtgatggaacagatctcaccccaaagattcaggaactgaagttccagtgtatagtatttttaaatatacccaggtaggctctgtttgtattgtttccttggtttgacgtgaactctgacttgaggttatctgttttcataacagaaaagtttcagatgtaaacaatgaagatcagttatctaaatgggtaattaaagatttctaggtctgataattcattctccgatttggtttatttagtgttctttgtggttggtggttttgtgcgtcatgtggcatgcattgtctgtacttacccatctttaagaaacccaggcacccctcttgactggaacatcttaatttatttctaaattactgttcttcccctcttcctccccatctaagaatgagagaattgaaacactttttttgttctcagtttcctaaaaactgttgaaaaaccatccagtctgattcaagtgcggaattcattcaaaattgttgccagatgatttctttgaaaaataggatgagttagagtattgttttctagccaggatgtcaactctccatggtgctattacgcacttcaggagaaagggatatttaagataactagactcaaaataaacatattatctcagtggcataaattatgttctaggccctgaagccaagattttggaagggatggatctataaccatttatttgcctgccaaacaactcagacacaaaatctgcaaatacattgtatttagactgaatttaattgaaatgagagttgtatgtaaatctgtggctaggaaaacacatcatagtctcctgattattcttggcagtgctcaatatagtcagttacaattttattccagaaatatttacagcttaattgaagtagaaggccttgattctcagaaagcattgtttattactttgctttattattctttctcttgtccttcctctcttgtccttcttcctctcttgtccttcttctgtcttttcttgcttctccctctttccatctgtattcttcttcctctatttctccaatttcttytgtttcccattctctttctaatctcttatctatatttcatctcttcttcactctgtcttccatagttacctttcccttctcctgtgagtacctcttattttgcttatgtattaatggcaaatgcttcccacttcatttccctgtctcttttctactggcatgcatacatcttcctttaagaccaaattctgaaaccacctatagataattcatgatatatcatrgaaaacagacatacatgaatcatagtgagaaatatarataacgaacgaggagaaagttggataccacaggatacttttgttgcaaaattatggcccgttttcacagcttggtattttgtagatgataagaagtgcatttncttttctaatggaaggtgtgtaccaagaatggaaaactgtttttatgtttgataaacattgggtctaactacaaactaacacctcatgatagtcatgagaaggatgggacatatttacttctgtctttaatcttctcttgcagatattgtgctggcacaatgccctggggaaacccaggwgatcaccatgatttcgaacctcagcgtcatgatgatggttatattgaagtcattggatttaccatggcctctttggtgagcaatataactnttttattaaaatgaaatgtattttagtcacagagtttattcaattcacaggactttagttaactttttctcctgctttatcaagttacacattttatgaattrtagagttgcttaggaaaaacaagaaaaaaaatcatcatttatgtcactaagaaaactgatgcacatttgtttgaacctcaagaataaatgagtatcacttcttacttttcctgattaattttctaacagaatgaaaagtttttatgctaattaaaaacattacactgggctgggtgcagtggctcatgcctgtaatcccagcactttgggaggccgaggtgggtggatcaactgaggtcaggagttccagaagagcctgaccaacatggtgaaacctgcctctactaaaactacaaaaattagctgggtatgatgtgctgcctgtaattccagctacttgggaggctgatgcaggataattgcttgaacacaggaggcaaaggttgcagtgagctgaaattgtgccactgcactccagcctgggtgacgagtgaaactgcatctcaaaaaaaaaaaaaaaaattacacyatagaaacatcccagcattggcacagaagccatagcattttatacttttttggttcactgaggagttttgtgtttaggtaaaaaagagacagtagcaacttgtggrtatccgtcttacttatgagtaaaatgatcatctccattatcacaaaatatctgaatatacaaagacatcattattgtgatattagtgcatactcagttgccacaatattgagatcaccttgtattttaattttgtttgcttgcattaaggaaggaaatttatagtgtaagtatattttcaaacaggttttagccatgcattcctgcttattattaaatgatgtgcggaccagttaaaattatgcttatcatttcttgtgtaaatcaggccacactgagtttgtaatgcaaataaaaacaaagcttctgcttgtcacctttggttggcacatgatttgtgctgtaccttatgcataaaagaaagaaggttgtatttctcattctaaacaaatcaaaataggtctctyttttactcatcttatgaattccaaataactctacctcaaattagtgaagtttaacagaaaaatctattgtgcttatggcaagaatcttcatcacctgattttgtgatggcccttgttaactcatctctagaataaaatagttgtcatggtagaaaagattggactggggttgacttactttccagcgttgtaacacaatatagctccttatctccagagctttttatgtttattgcaaatgaagatacaagccaagagcaaataggattaagtttaggaaggatatatgcagggaagaattctttttttttttttttttttttttttttttgagacagagtctcactctgttgcccaggctggagtgcagtggagcaatttcggctcactgcaagctctacctcctgggttcacgccattctcctgcctcagcctcccgagtagctgggactacaggcgcccaccaccacgcccggctaatttttttgtatttttagtagagacgagatttcaccatgtttgccaggatggtctcgatctcctgacctcgtggtccacccacctcagcctcccaaagtgctgggattacaggcgtgagccaccgcacccggccagggaagaattcttggaggtgacaaaatcatgcccgtatatgatggaaaaaactctctaaactgtccatacgtgggttacttattctttattcactgatcgagtgaacatttattgagtggttatcatgtgctagagcctcctagttctgactgtggtagaaggctctcagggattgtctgcaagatgacratcccttacctargcctggaagtccaaggggaatattcagtatttccccattgctcttaggatcaaaatctctgtccttatttggcctgtaaagttgaggttctgtctggttctctagccttccctgctctcatctttgctttctagctcaagcagctgacaagtgaagcacagcatcggctctcccttgcttcttttgtaccaccaagccattgcacgtgtgctctctctctctgaaatgtacttcaactgtttcttctatgccttctcagactatatctgtgtcttgttcttgttctttttgtagtcttttctggtatgggtgttttttttttctaacaattgtataattagtataatttttattatactaattcgtatatttagtatgataattagaatattacactaattatataggagcaatactgaaactgggtaattagtggagagttgaatggagggctctttcacaaatagtgcactaggtttatgagaaaccaattcttgagctgaagataaaaaggaaaagaagataaaaaggaaaaacagtaccagaaaaagaactacttggaaagggttaygtgataggagtgatatttgcaaagaggaagcaagcaacctgtgctcacctggcagagagcaagccagggacataaatacagcgactgcccacttcaccttgacctctagatcttctgctggtgggtctatctggagaagtctgattggaagccagaagacatgggagccactgatgcagtccaaatagctcagcctcacagagcagaaaagagggcagggaaggctggagaggcagctggggcagcwaatggtgaatatccatcactccactgtgggtggccagtccacaacagggassctgtggcatgcagttggcaatgcgtgacgtgactgaytgaattttaccaggagaagaagaatggaacttggcattctggaaaaaggaaaatttacaaacatttggaagtaggaggaattgtagtgctttgtgggaactataagtagtttcatgtagtttaaatgtaggtgaaaagagagagtgatcacaggtggtgctaaagaygtgggtaagggccagatcatagagtgcatcacagcactgatctaggarcatttactttattcagcattcttgaggagttagtaaaatttttttaaagataaatatttatatgggaaggtttcagtgtaaaaatagacaaaataatacaacaaactcccaagtatcatcactcagcttttataattttcaattcatggacaatcttatatttgtcccacctacaacctcttccattatattattctggagcaaatcctagacattacgtatatacaatatatgtcatatatacatcatatgcatagcatatatatcattttatccatcaataattcgaaatggacttttaaaagatactttcttttataaacacaaccacaataacaktatattatttaaaaaaatgaaaataatagtacctgaatatcactaaatatttactcagagtttgaatttccagttgtctcacaaatatcatttattttcttatgcagtttctttgagtcrgaatccagataaaacttacacattgtggttggttgatatgaccttaaastctccgtagtttccccttcaactcttcctcatttatttattgaagaaactggtcatttgtcctgtcaagtttctgagtctgaattttgcagataggatccctgaggcatttattaaaatgtgcttctttcttttttctgtacttgatagctggatctacatacactacatatattttcccccaaatctactttgtaagcagtgttttctttttctaaaaaagaatatataatgtctggctttctttctccttttttaatgttggcagatattgatggtcaatgtctggatgtaggaaacattaagggttgcaaaatagtgatattctaattctcttttttttttttttgagatggagttttgctcttgttgcccaggctggagtgcaatggtgcaatctcggctcactgtaacctctgcctcccgagttcaagcgattctcctgccttagccccccaagtagctgggattacaggcacccgccaccacacctggctaattttgtatttttagtagagatggggtttcaccatgttggtcaggctggtcttgaactcctgacctcaagtgatccacccgcctcggcctctcaaaatgcttgggttacaggcatgagccaccatgcctggcctgatattctaattctatccttctttacctagatagctaggtaaaggataaatgcattaaatgagatagaaaacataaaagagagaatatctcaaaagaaatacactgtgttttatctattttaaattcaaaatctctgtaagacatctaaggaaatatagaaatgggcaatttaaaatatatgtttagagttcaggagatcttttcaggagagattgttttggagagggaggggttctgccagatcctttttattcttctcctatcatttgtaggaaaaagagaaataatcgcagatggtagttggcaaaaaaggaaatggaatactaaaattaggtccattatttttttctcttttcatcatgtgaataaggtaatccatatacatcatcagctagcatcaaatgcatgattgaatctcagattccagtgactctaattgcttccaagaaagagaatgctatctaagaaaagcaaaattaaatggagtttaaactgtatggttttgaacattctatgacctctaaatgtatactggcatatatttctctctttttagacacattttatcttactacttgctactcatatagcagtaaagcattgtatttttttttcattcaggatgaaataatctaatttgcagwcttcaatttcacatttcttgaactactatattgcttatatttctaaggaagtaaattatttgaaaactcaaacatttgtttaagatgattatgtaaacagacaaatatagttatttgggtatatgtgtatatatttttgcatatttaatatagctgctatataattaaaaacataaccagtaggtcaagctttttagaaacaaactatttttcttagaaatttatatgtgtgtagtaattaaaggctataaacttaaaatcatggaatacactaataaatatatttgtacattgcttatgatttcagtgaaatccaaaaaattgaaaattcagaatggcacttttattataagagagctttgaaatagaattactggaatgagaaaaaagactgtttcttttagactctttatcttgtaattgcaaatttcaaagtagaagtcttcaattcattttactggttgaaatgcattcctgctaattaagatgattcttcattgggtgctgggtaatctgattacctttttggagtttacacagaccataatcagacattgtaatttgtatttatttctgccacaattttctgccattattgtttctaaggtcctttcatgttgagtttgtttctaagtaatttaaacttctcaagacgttcaaagcattattcagtcagaggaattgggaacctaatttgccattcagtatgaaatccaaagatttcagtctcgtaaactttaaagaaggcacgtccagctttctttttgttaattgaaataaaactgtgtaagtttctttatagttatgaattaggaaagcaagaggttatccagtgagtaaaaaggacatggagaaattctcagggttgaagttttacmcttaccatatatctttgttttaagaaaaaggtaatattaaatgtatgcttattttgataatatacataagaattaaagtaaattatcagttataattttatgactcataaataaataactatatttgatgtgtttctaattgctttatttttacatttttaaaaatacaygaaaccatattataaggaaaacccatactacaaatggctacctacttttttattgtataaatatagcctaatttatgtaataattattttatgcaaagtttcctttatgaagcttttaggtttttgatgttttatattgcagataatcctgyaattaacataattgtttgtaaacctctcttcacatttcaaattattttcttatggcaaatcctaaggaaattacaatgacataagcattttgaagcctcttactaaaaattatagaattattttttagaaatgtcatactgtttacttgcccaagagcggcatatagagttcctggatgagaagtgatttagtagacagagttcctggggccggccgcgactgtggcggtgggggcggtrggagccccgcaaggcgttgggggtcgctgaaggccagccagctgcattccaggtggcacgagggaccgcccttgtgctcagagaagtgatttaaatatccaacagatgttgaaaatgtgttaatggatacagacataaatgatgtttaaatattatacttgatgaaacagggaagagaataaacttccatccctggaaggaagtaaaggaattatatatgttttatacagataaaawtctggaacagacaattatgtccttacaaacaacaacatttgagagtaaggataagtttatttttattgttaccattttgttttttttaaaagaagtcraatgtgtttttttgcatattttaatgggctgtttatcatttattgttgaaatagaagagatatattctggatacaagtcttctgacagatttatttattaaaaataaattctttttgtttatacttttcctttttgtgtttttagtgtttgttttgatgagcatgttttaaacatccaattttatgaaaaaggcttaatttgtattagagctttttgtgtgcttcctaagaaatctttgattactcccagaaagattgggaggccattctcctatattttcttcttgaagatttataattttggcttttatatgtaagtatatgattcagctcaaattaatttttgtgtattgtgtaagatacatattcattcataaaaaatgcatttatccagytttttccagcactatttgttgaataaactttccttttctgtaaaattgctttggtgcttttgcttggtgtctagattctattctgttccattgatttgtttatcctcattgccaataccacactgtcttaattagctgtatggtaacccttgaatctggtaatatgaatcactttattgttctaacagtgttttccttgttctagatctttkggcatttgcatataaatwttagaatctgttattatctgcaaaaaattaggattttaattggaattgcatttaarttttagataatttggggaggaattggaatattaacaatatgaatgttccaatccatgaacatggtatatttctccatttatttaggtatttaatatccatcaacaatgttttgtagcttcagtgcaattttcaggtttttgcacaccttttgttaaatttatttctaagtatttttaatgctatcttaaacagtaatttaaattttacatttaattattgctaatatatagaaataactatatgtgtgtctatacatatacaaatacatatttgtttattgaccttgtctcataactttgctaaattgacttattagatccagtagcttgttttttttaatagattccttaggtytttctgcaaccacaattatattgtttgaaatagagttttactgtttccttacatgcctttccatttttattttttatttaaaaaatttttatgccactctagaaaattctttaaaatttctttttcttggatgttcactaagatgttgaataaaaatgataagaatgcacatgtttgtattgttcctgattacatggggaagcattccatatttttcataaaatatgcttaattgtagtttttttttattagtgtcctttatatgatgaaggaatttccatttcattcctactttcctgagagcttttgatcacaaatgagtggtgtattttatcaaaggttttttgtatctgtgaaattgacatacaattttcccctttcttttgtttatatcactaatttcattaakttttaaaaatcttatactgatcttgcatttctaggataagcccctcttaggcttgatttattatcatttttatattgctagatacagtttactaatattttgttaagcatttttgtgaytatgattatgagggagagcgataaataaatttcttttcttgcataayttgattgggttttgatataaaggttctactggccttggaatctgagacaagaaatgacattctcttctatttcctgaaagaatttgtgaagactggtactatgatttttttccttatatatttcataaaatttcctaatatactatttggctttgagatttctttaaggcaagtatagatatagaattattcatattatctatttyttcttgagtcaactttattaagttaaatatttcatgaaacttgttcattattttgtctaaattgttgagtttatgtttacaatgctattaatattttactgtttgtaggatcccccctccattctggatacaagtaattttatcaatttacctatctttttctcataatccttcttctctttcttaccttatgctcttttttattttttgatatggagttttgctcttgttgcccagactggagtgcagtggcatgatcttggccactgcaacctctgtctcctaggttcaggtgattctcctgcctcagcctcctgaatagctgggattataggtgcccgccacaagggccggctaatttttgtatttttagtagaggcgaggtttcaccatgttggccaggctggtctcgaactcctgacctctggtgatctgcccaccttggcctcccaaagtgttgggattacaggcgtgagccactgtgcccagcattaccttatactcttacttccatacatctttcacattccatatgagctccacaaatcagcattaatgtatttgctttgaacaattgttacttttaaagaaattaagagatgaaagacaaatagaaagtyctttgttacccacctgtctccctttccagtgctattcactccttcctgttgatccaagtttccatctggcgtcatttttctttaatttcaatgatttcctctaacatttcttatagtgaagttctgttggcaacaaatagttttaaattttatttttctgaaaatgtctttattttatcctcattctttgaattatgtttttgtagatatagaattctgaattctggactgacaggtttgtttttgttcgtcttgctttagctctttaaatagttgttttgttttcttctggcctccatattttataatgaaaagtcagctgtcatttgcatcattattyccttgtatatagtgtgtctttttttctctgttcttgagattttctctttatttgttgtttttttaaaaatcaaaattttaatttatgagtagtaattgtgcatattsatggaatacataatgatgcttcaacacatataatgtacagtgatcaaatcaggataattagcatatcgatcatctcaaacatttgtcatttctttgtgttgggaacatttaatatcctcctcctagttttttgaaactagatattactgtyaactatagtcatcctacagtggtatagaacactaaaatttatttcttctatcttgttttaattttgtatcctttaacaagttttttcctgtccctccctttccttcaccctttctagcctctagtatcctctgttctactttttacttctgtgagatcaacttttcctagcttccacaaattaacgagaatgtgtggtggttaacgttctsttcctatcttattttatttagsataatgttctccagtttcatccatgttgccacaagatttcattctttttaatggctgaataatattccattgtgtatacatactacatttttttttttattttttgttgttggacacctaggcagtttccatatcttggctattggagcagtgctgcaataaacatgggggttacagatgtctcttcaatatactggtttcctttctattggataaatgcccagtagtgcaattgctggatcatatgatacttccatttgttgttttttgaggaacctccatattcctctccatggtgattgtactagtttatctttagttttaaacctctttgtagctgtattactttcttattgctgctgagaacaaatgaccacaacagtggcttaagacaacatacatttattattttaaattcrtggagatcagaagtctaaaatgggtttgtaggcctgtgttccctctggagattctatggaagaattagtttccttgtctttttcagctactggaggctgcccacattctttggcttacagtcctgtgccactccagcctgtttctattcttgcattgtcctctctgactttcattctctagaccctaatttttctttataaggaccattgagactacattgggtccactaagacaatccagaataatcttcctatctcaacaaccttagtttacttacacctgaaaaggcccttttgctccatgaggtttgtgtggttcctgggagttagaacatgggcatcatttttggtggttgtagtggtgagcactgttctgcccaccacagtggttttctttgcatttatsctgttttaggtycactggtctccttggacctaaaggtttattyttttcsccaacgaactaggaatatttttattcatgtattttatgctcaattctccctttctctgcttctgggatttaattaaatgtattttagattgcttgttattgtctcataggccatgaaatagaataaaacatttctgtctctgtttttcagatayggtaatttctattcatctgtttttatcttcactggcctcttttttwctgcagctttcaatttgctcttaagttcacycagcaataattttgtttttttcattttattatggrtgatrttttcttgcttctttgcctgtgttgtcctagtggatgatacatcgtatgtgggtctggattgtgtttcgttgtgacttagtgtgtactgtcttagcattacattctacttagttctccacttcctgcttcacaagataaaaaatcagtcttatataagggacgaattctactggaccagtattaaaagatggatagggtatatttcttttgttccagaattatacaaatctattttattccattgctccattatattttattgattctgtcactatactkccagaatattgcagattttagaggaatgattgtccatatagctacctttaaagcatacaaatgatttttttctcaaaccgcatcatgaatacgagtctaaatctcactaacagctatgaaactggacaggtccacaagagtggctttttttttttcctgcttctcataaactcactttggtagtgactagaatctactttcattaaacaaaagtgaaaaaagacacatgtatacaagtaatcccaatgagagttttgagatttttacaagactttttcatagaaaaatttttgacttatagtaagtatgcaataattgctactattttttttaatttgcagaagggaggtttttcaaatgcagttctttctttttcactctctagcagtttagagtggctggacaatatcacatcacttatatagtcaaggaaagaaacagggctctagatgggaggaggtggaatttgagaacatgattatagaattgtaggtacaaggccaggcgcggtggctcacgcctgtaatcccagcactttgggaggccgaggcgggcagatcacgaggtcaggagatcgagaccatcccggctataacggtgaaaccccgtctctactaaaaatacaaaaaattagccgggcgtagtggcgggcgcctgtagtcccagctacttgggaggctgaggcaggagaatggcgtgaacccgggaggcggagcttgcagtgagccgagatcccgccactgcactccagcctgggcgacagagcgagactccgtctcaaaaaaaaaaaaaaaaaaaaaaaaaaagaattgtaggtacaacctagaatcataaaacgctagttctgaaagtgattgtagcagcatactrtaatcactttacatatgaggaaactgaatttatsgaattatttttgctataaatattyattagtgtggacaataattaataccaccactactaatagcatttaggttccctacagcatgttttaccatggagctttaaaacacaccagtgggctgggcgcagtggctcacacctataatcccagcactttgggaggccaaggtgggtggatcacctgaggtcaggagtttcataaaacgctagttctgaaagtgattgtagcagcatactgtaatcactttacatatgaggaaactgaatttatcgaattatttttgctataaatatttattagtgtggacaataattaataccaccactactaatagcatttaggttccctacascatgttttaccatggagctttaaaacacaccagtgggctgggcgcagtggctcacacctataatcccagcactttgggaggccaaggtgggtggatcacctgaggtcaggagtttgagaccagcctggccaacatggcgaaaccctgtctctactaaaaatacaaaacgaaattagctgcacatggtggcgtgcacctgtagtcccagctactcaggaggctgaggcaggagaattgctttggaggcagaggttgcagtcagcygagatcgtgccactgcactccagcctgggcaacagagtgagactccatctcaaacataaataaataaataaaataataaaaaaaacccagtgcctagaaatgttaattcttgataaaatgaaaaaaatcttaatratagatgttcctgacagtaaaatagcttgtaaaatgttgtgtcaaaaactatgaattagctgatattggtgccactgcaaattatgtaagtaaaatttctcattttggtgactagcygagtatatcaaagaggaaaataattcaataggagatagatccattgaggctatttagtacaggaggctagttatgggatgctagaagaactgaaaagaggtcaacccatagattrgcaattcataaatcgacaactgcaggaagtctctgtcacctctagggctagagggacagcgagagaagatggtgttattagcatcaaggagctcaggctataaaacagagctggaacctgggagaagtggccacctgagaggcctgttgatgggcatggtgggagggtcatacggcagaactagaactctggagaagggaatcgctccaggagagttggagcctcagtgaggrctgcctgtctgagttggagccacagggacaggttcgcctggagagagtgcttctcagtaggaaatggaagctcaaaggaattaytagctattgccagacactgattgagaaaaagagatgggargaaatacttactctctcctccctttcagcccactaatatttatatttgtatttttatttcttgttcctttgtgtatgacgtgaggtagaatactgattttatttttctctatatagtgggaaatattcccagcctctttggctaaattatccatcatttctycaataatttataatrccacatcaccgtagttcatgtactcgtatctttgagtctattctgttctrttattcatttccactggctttcactattttaatgactgcatctttaagtattatatatttcggattctaacaggggcagtctgctatccattgcccctgttctttccaactatccttagtaatttgtggatctttatccttcaaaattaattattgaatcatttttataagtatattagtcaagattctccaaagaaacagaacaaaagggagtgtgtgagtgggggagagagattgagatttattttawtctcacgtgaattgtgaattggaggctggcaagtcccaatttgcaccaatttgcagggtaggctgacaggctagagacccagggagcagttgatgtttaagctcaagtccaaaggcaggctgaggtcaaattcytcctgttctgggaaggttcttcttttttctttttagagtcttcagcaagttggatgaggcccactcatgtttgctttactcaaagtctactgagttaaatgttaatctcattaaaaaamtactttcatagaagcatctagaatgtttgaccaaatatytggttactgtggcttaggtaagttgacatgaaattaacatgacaacaagattccttaaaatagtatttctattattttaatttgaattacrttgaattggtacattaattttggaaaattaacattattagagtattgaattattctgttcatgaatrtaacatgcctctccatttacttaagtcttcccttacatctttcaataaagttttaaagttttctgcataaaagtctgcatgtactgtttttgttgatattgtaaatggcattttatatcctattgtatttgtttatttaatgctagagtagtagaatactattggttttttaattcaacagtgyatcagccatctttcttatgagttttaacacttggcctgtgaattttcttggaatttttgtgtrtgggatgatatcagtagaaatattagtaagtttgcattttttcttttaattctttttttttctaattttatttctttgtctcattgtgttggtcagtacttccaatattatgttsaaaactttcgttgctgatggataactttgtttcttgaaaggaatgcttctaaatttttttttattgtgaataatatttttttctaggtatcttggtgggtgatctttatcagttacaaaagctactttctgttcttagttttctatgaaattcatttttatcataaaaggcattgaacatctttttttgcttaatcttttgagatgataatgtggtttttctcatttaaatmattaatgtactgaaattacaatgatgtattttctgatgttgagtaattcttaatttcttgattcttaacaataaaccataataactttaacttctataaaagagaccactggcagcaattagatgtttttaaatgattttggcattatgatcatgaatataatttaggataaaattttttgttttcttgtactgcttttatctagttttgttaccttaaaagctatagcatcatattttctaaagcatcttgtactaaatagacactgtctttccttaacatttaggtaggacggacttrtaaaacatctagcctctttgacatttttggggagggggtagtggggmaggtaaaatgaggaacattttttgataactctttcaatttttaaaatagccctaatctatttaatttctgtatttattacaccaaacttcgtaagttatatttttccacgaaatttctttcttatctaggtttttcgatttattgttttcctaaaattcctgcatgattttcagaactctgtattatctctttagctagctccttattttatttatttaattttattttttagatacagggtcttgctctattgccaggctggagtgcagtggcgtgatcatagctcactgcggccttgacctcctgggctcagaagctcctcctccctaagcctcccaactagctgggactacaggcatgcaccaccgtcctcagctgatttttaaattttttgtagagatggagtctgactatgttgccctagctggtcttgaacttctgacctcatgccatcctcccactttggcctcccaaagtgctgggatacagatgtgagacactgcacctggccatttcttatttttaataaagaaaataattttggccaggcacagtggctcacacctgtaatcccagcactttgggaggccgaggcgggaggatcacgaagtcagaagattgagaccatcctggccaacacggtgaaacctgtccctactaaaatacaaaaaattagccgggtgtggtggcacatgcctgtagtcccagctactcagggggctgaggcaggggaatcacttgaacccgggaggtggaggttgcagtgagctgagattgcaccactgcattccagcctggcaacagagtgagactccatctcaaaaaaaaaaaaaaaaaaaaagaaaatagttttatgttttctattcttttttgtttagtcttacaagaggtttgtttaccttgttagtctttaaaacacaagcagatgatctcttgcgcttgatctccatgtcacarattttttccttcgggtactttgttccaggaatgaggctggggctgatagtggcggtgaggaaggaaaggagagtaaggtttgctcttgcttcacccctcccccaacccaggattgcctgttctttccatctgacagcaagtagaatgacttaggcagtaaggaggaggatatgctttgagagggrttgagggaaaatattccagggaagagtgtagtgtgaaaagatagaaaatctcaagacatagctgcagtgcaaaggagagctatggtcttgggtcaataaatggcaatgaatgcattaggkcagggactgtctcagttttcctctcragtcacagaaaagcaatatstgacgttctcagaagactaacacrtgctaggttaaatagacagcgactgtcacgaataaatcaaagtattactaatagtaaatgattcattctagaaagtcttggggmtttctattagggctcttagrgactatgtcttataagatgctaagcctagaccaatctgagacatgaaaagtatgtatttctaataagttttaaaaaattacttatactctaatttgttccaaaaataatttaatgtgaccgtgctaacaataatggaaatgtctctaccctgaaaagctaattacagtacttcctcttgtctctgtgcaaccatcttggattgattgtgaaatgccggtaggggcggcattgacagttattaactctacctgyttgtaatatttgctgttgttttatttttgagtctgagaagatggcttaaaagtggtctagactactgtgtatgacttcaaataccaagaggttggaaggtgttcaagccattttcagtccggttagactcagcagaataccttcttaccaggcaggttttacattttatctgtcatgaggcctactcaagwctacaaaataaaaagagtaaaatcatatcagataataaggcaaaaagaattttagtaacttctcacatcattctcctctgctttcttgctcaccagtcagttggcgggaggtgtgtaatagactaggaaggggcacgtaggaaccttctgggtgttatacattttccaaactttggtctcgatggaggttcacatgtgtrtataaaatatttattaaactgtataataaaatttgtgtgctctatgtatgttatacaacaaaaatgtatgatttttctyttatttcctagaaggataaataatactraatacattttttttttactaagtcagaagaggttatacaaatgtgttgctccttaatgacagacttttaatattgtcttgaaactccattctgtggctaccatgaygaactgagttctgtctttcattttgatccttaaagctgctttgctttccagagtgttttaaattaagtaattgatgttattttgcattttgttgatcttatacaggttagagatagcttgwggaagtttagataaaaagcaaacacctatttaaacttgaaaagtaacaatgtgctgcatattaaagtattggataaatacaatttagaggttaataaactacctgctttatattcttcatattggttttgttctactttcattggttatttaatgagaatagataacacaaagaaaaagctttgtattaaactaacatgcttaaatttagatttgaaacatataagagcaaaaagtgatagttaataggaatttatggtaaagctcgtcaaaattgtgaatatttggtttatttgcattaatggtttatccaggtttcctactatggtggtggttaattttactaattttagtatgtttatcagagactccttggttatgtacaatggacttgggggtttccagctttcttttncttttttttctttgagatggagtctcgctctattgcccatgctggagtgcagcggcttgacctcggctcactgcaacctctgcctcccaggttcaagcrattatcttgcctcagcctcctaagtagctgggactacaggtgcctgccaccatgcccagcttttttttttttttgkatttttagtagagaccgggtctcgccatgttggccaggctgctctggaactcctgaccwccggtgatccacctgcctyggtctcccaaagtgctgggattacaggcatgagccacagcgcctggcctccagctttcttaaatnataactaactccttgctcccctttgactcttgtttttataggcagccctgcaagttgggggccatggagagaggctacaccagtgtcgagaagtcatgcttctaacttacaaatccatccccatgcaagtggatggggagccctgtaggttggccccagctatgattcggatctccctgaggaatcaggccaacatggtacagaagagcaagaggagaacatccatgcctttactcaatgagtgagtctgctcatggcctaccttgcttaacatgaagaccttggagaggagagtgcagagcatgtgcatggtctggggacctcactgtgttgggaagaggaaaaaagtccrggasactcagtagttccttggtttctctcataggaacacatagagtttttttctccttgtttattatacagttccatgcccttcttttagtagttattactgtacatgagatagatgattcttcttcactgaccacttgagaatatatttactgggactagcagaaaatcattgagagggattctaggatggtaaaccgtgttcaggtaaatgcstttttgtttgttttgttttagggaagcacatagttagcctgctctttacccaggtcgcttggagagtgttggtttctccagtcacrggtggttggcagagctggtcagtggcttgcctctatccacattgcatctctttctgcctgccagtgaattgttcccttcctgatgttcccattttggggtcctccatactctggggcttcaactcagtgttggctttctgggcagcatcctattgtccagacatagcctgacccactctttctacccctgaacacatggtatcccacctggagttttcctttcttaggcattttaataaactgacttgaggtaaggtaatattggctagatatttagaattcatattcatcttatagtgtgtctcactccaactagtgattaagtgtctgtggggttggagaaggggacggaaaatgaacataatttttggcatcttttgagtatttcctctatatcatgctatgtgcttaaggccatttcaggacttagccttttgtcattctctatcacagtgagggactctcaaaggtgctcctcccgtttgtggcctgtaatgcatggttacctatttgcactgagtggctggcttccttgtggtgcctgtaaagcaagggcgtgctttgccatgcatttattgagtcaatataacggtatgcagaagtccttacaatagccagcaacacaggtgccctcattcactaccaacacttactgctctctctctgtggtggcacatgttggttgaggaacaggattagacagtgctctcagagtgttccagcttttggcatctgggtctcagtttgaagctggggtaaaaaatcctgtctgtcctctccttccttctctcccagaatctggacttcccccagaatttttcctagatcattttccagaggtgttttttagttacatgtctttctttgtttacattttgcatttagtgaaactcctcgctcattcctcctgtcctccgtgcctgctgccctccctgcctttaccttctatcaggttaaatacacaattgctgaggttatatgttaaaaaatgtggcatgccagtggttgtatatggttcatccaattccccctagaaatgttagagttaaatggaccaagggtttgctggaaatctatgaactactaagtgaaaaaccatctctgaaactgtgctatagcctatgttgttgggtcacttgtagatagttaagaagatatgcagaatctaaaagtttttactatatataggcagagaactcacagtcttagacctgctgcttctgtatttaataaccttatcagacatgaaatggttttcaggtatttagttttaaacagcttttacctttgtgttgagaattcgtatttgctcagcaaccatattgttaagagttcatttgactttctgcatctatagaagcacataaaaagaatttttttctttttgtactcaaggcacacatgatatatgatggcattttttgtagcacttagctttgcaggtgttcaagaagcagcctcaacttaaaaatactgttactggctgggtacggtggctcacacctrtaatcccagcactttgggaggccaagatggccagatcacttgagaccaggagttcaagaccagcctggtcaacayggcaaaaccccttctctgctataaatacaaaaattagacaggtgtggtggcatgcgcctgtaatcccagctactcaggaggctgtaatcccagctactcataagaatctctaggaccacaaggcagaggtttcatggagccgagatcacaccactgcactccagcctgggcaacagagcgagactctgtctgaaaaaaaaaaaaaaaactcaaacaacaacaacaacacaccccaaaactgttacttactttctaccagaggcagtgatgcctgcatccaagccaccccatgccctctgaaagacttatgagaaatgggaataatagtataattttcattttattaatgaatatttataagacttaaagataacaaaaatctttattagtacttgtgaaaaattatcattcaacactayattttgagaaaatcaatacrgatagcacattttcaaaagaaagcaaaaaaacctagtcatcatgtaatgtttgcttactaaaccttaattgctctcattctgatcttatttaccttctaacctatgattaaatatttctttcaattttaccagaaaaccttgttttgaaatctaaggtcttccactagatttccaagtggagtttcaagttcaaggtcagcctttccttcaagactgttctataagtgttcttccaccttctgagtccttcaagcctttgtctgctttgaccatcaattgtgtgaagtgcaccatttgaaacaatgaagaaagagaaacttgaaagacattttctttatttcctgccttcctgtctttgcctgtcttcttttttcctttacttgaggagaactagtcgaaaatatctttagcatttttagcttaaaaacctctgtgtgtgtgtgtgtgttcccagtaagaagaaggtggttgtttaattcatctttaaaaattaggcttctttcacacagcatgttaattggatattcgagacgtaagtgctgtggctcccgtaacaacagttccctttccacttagatgccagtgctccttgtggttctgccctttctctgggagactgtatctctgatctgtgtcttcagcccagaattttcttctaaaaattgaagactcatacccaaatatcttagttgacatttttaccttaatgtctcatagtaacctcaaactacatgctagaaactggactcattaactttatttccttgacttttctaccccaccatccagtgagcctattccmttcacagctgtacacatgaaactaccatccattcatttgtcctgttcctggcctctggggttccctcagtcgcttctacttctatacacctgtgttagtccatttttgcattgctgtaaagaaatacctraggctggataatttatttatttatatttatttgtttatttattgagacagaggctcactttcttgtccaggctggagtgccatggtgccctcttggctcactgcaacctccgcctcccgggttcaagtgattctcctgcctcagcttcacgagtagctgggacaacaggtgtgcgctaccatgcccagatgtatttttggtagagacagggtttccccatgttgctcaggctggtctcgaagtcctgggctcaagtgatctkcccgcctcagcctcccaaagtgctgggattacaggcgtgagtcactgtgcccagctaaggctggataatttataaagaaaagagttttatttggctcacagttctgtagcctgtacaagcataggaccagcatctgcttcgcttctggtgaggcttcaggaagtttacagtcagggcagaaggtgaatggggagctggcatatcatatggtgggagagagagcaagagagacgggggaggcaccatactcatttaaacaactrattctcacatgaactcagagtgagaactcactcactacctcaaggagggcaccaggtatttatgagggatctgcccccatgacccaaacacctctgaccaggccccacatacaacatcggggattccatttcaacatgagatttggatgggacacacatccaaaccatatcagcatccatcagggtagctactacattctttgaactctatcttctgtttatttcccaagtctttgactctcatctcctctatcttctctaccagtaaagcagccagagttcaaaagtcacgtgagctacctctcagcagcattactaaaatatgcttctractattttctgttcctgcccttgctgccttcacataatctgtctcttctgatatacccgttagattgatataagaatcccaagcctgtgttccttagctttgcagacctttttgatcactcccttcttcattctctttgctctttgttccagggaagattgctgttcctggaacagtagcctgtctcctacatcatcctggttttgctctctggtcctcttcttgcagtgccctctgcacctctttatcttctgctaactcctcgctcacagcttaggaccccattgaaatgctactattcctaataagccttttctgtctacttctagctgttagatgtacctttacgtgtttcagtggtgctcttggttatttccattacaccacttactaaaaatagtgtaatcattgattcactcctcccttctctgctctgtggggaggccctaggattttcctcttaggatcctcagtgtctgtcatagctcctgagacagtcacatcttgcatcagcgactcacacatgaatccattctataatgctgtctctgctgtgtttctcagaaattgctttctaagataacataaatctaaaattttgtgaatataaaactaatatcaaatgtgttttggtcacattgtcttataagtgaaagatacatatttaataatttcaagctatggtccacatggacagaaggaatttccatgagaaatagttaactaatagggcttcatgatgccactagatcttcatttatgcaaaaggaaaaattaatgttttctaaaaaatatttcttggcttataatcccatttgctattattatacacaaactaaaaagctaggtcccactgtgttcagaagctccttatatatatgggagcatatgtcatttatcatagcataggaatctrcacagagtatgaactacagtaaataccttccccacaaaaagtaataagcagatttatctaggttcatattcatatgctagttacctgatagccaatatgctggattatgttctttatttgaaatgtgccattgaaggagaatagaaacaaaattacccaggtgttttgggagatcttcagtgaactattaataaatagataatattatccttagttcactagtaattaaggctacattattaaagatgatcgtttcatccaatgaccaggtttctagtcagcaaactttgaattgagcaatcgaattccatcatcctaggctgctgagaactattattgtttggaaacgatagtacttggaggataacacagacagagagagtcttgggctggagttacctcatgggtgactttgcatgagaagttatgtatgctgcagaacagagagatccgtggaactaggtctaatgtagttataatgaaactctttaaataagagagtggagagaataattatgtaaagtcaacaaaacattttgggtttagtttcttaaattctacattttgtcttttctagcagctgctgtagactccaatataaaagaagggagaaaagggagaaatctgtggtttcatttttctacccagaatgtgggtggaatgatagcaatacagtgatacaattagactttcttggtattacctttggagtttttaaaaagcctttgttgtttaactgaaggaagttgaagttttggttgagacactctttttaagatgattgtcttttggtgagtgttcctataaagcctggggaaacctgatggctgtgtgatgaaagggttaaattgaccttgaatcttttcaaagatgagtttaccatgccagcctaccactcaatatgtaagtgtgtgccttctctccttgggtgtcctgatgggcctgagcaagggaggccatggtcatccccctacaccccccgacctgccgtccagcatcgatcccagcctggccccgctccggtctgtgacttgcctagaaccagcgccttccgtgtgtcctgttggcttcgttgctatcaccggctttttttggattatttccgtggctggcttggttttccttttcctttccttcgctgttcggtgatgcgctcatttaatttctgtttaaattttgtgtgtctctctttctctcccctggcttgttccttgtctgtccacgctgtcgctgactctgtcttcgctgctcattccctgctgcctctagtattcatcaggtgcaaactgcggacctgcggcgagtgtctgctccccccggctccttcaccatgtgagtacagtgccattctgtttctacattttctccccagcctcgtctcctcagggttggactacctgtgtcccttgccttcacaggtctgttcgtcagataaggaagccacctcaccagaattgctttctgttgccctctttgatttgaaatggagctgtgaagtttttcatgttctatgtgcttccatcctctaagttaacagttcaatttttggrtgagatactttagggtccatggttgcctggggttgtatagaattccatgctaagcattggtttttatgggaagtgcataataccgttagactatgtcattacttacggctcagagataagctcgaggaagtgcctgcagccctcaatttctggatgaaaccttaagattatgcgtggagttttgagtgtgtgtgtgtktttctgttttggaagatccatagttacagtaaaagttcaatgaccccaaactgtcactgagttagcaaaatgcatttttatgtatatttaggagtttttgcttaatgtagtccagggtattatttttttctagtgagaacaaaaaaatatgttttttagcatttcagctcagaattattttgtgctgtgtactctgctttgtcctttgttttctccatatcacatatgcttayctagcatttattatgtttcagggactgttacagatactttacatattaattaatttgctctcccaacaacctttggccatatgtggtataattatctcccttctatgcatgaggaatctgatagacagagaggttaagtaacttgcccaaggtcacacagttaataaatcatagagtgggattcagactcaggcagtctggcttcaaagttcatgtttttaacaattcatagtctgctgcctttcgtctgtcaggatcctgtrtatttctcaaggcccacttgaatgattacctttccaaagaattcttctttgattcttgctgtcagagttaattacaccctcactggagtttatcattcatgtatctgttgcagttctcaaggtttaatttggtgttaattacattaactctgtgtctgtgtattttacacagtagacttaggctatttgagatgattggcaatatcttaatatgaatcttgtgttcccagccatgttcacagattttaatatgaagtattctgaagccaaacaatgattgattggttttcttggtggaatgagtgmataaaagaatacatgtctaaatagaattgcacaatatctaacatctggtgatatgtatgacaaagcaattcctaaagttcagttatataatctactttcaactctcatcttatggatactaatttacttattatttaaaatatgtatttattcaaaaacctttattttgcacttgctctgtgccagacagtattttatgctctgtgtctagtggtaagcatgacagagcactaccttcctgaagcttacacttgagcagtcaaagaatcaataggaaaatgacattcaattgccaaactgaatgttgtggctggagtaaaattctatattctatataggccagttcaataaatttgagtttaaggagtggctgcatgtgatcattatttttagtggctccgttgattgtgatcaaagaattgagaatgttaacagcagaaatgcatatgatagtcatcttgtttctattatgggttaagttggttgtatttacactttagttgtgtatcttaaattggactgtttatctcttattccatgagtgtgcgtgctacatacagtaaagtaaattgtccatacttgtttctgtagggtgcagcaggctctaagttgtggttaccttaaaacttgaatgttaatttgaaaatattttatatctacatatgatatatattgaatattacatgtcatagattttctacctatagataaaacatttacataataaacattaaatcaggatattattttaaaaatcagttaataaaactatrtggaatacagcaaggaatgtggagaaaagtttaagcacaacatgtgcattttgtctttttatgttatggcagtgcggatagccttgatttactcacacactagtgtttgctaatttcagcaatgttgaaaaaaccatggtaacattgctttggtcctgtagaagttaggagccccagtatcgttaagtgagattttatatatttttggcggggaggggaagggggttgctatctaatcagccactctctgctcagaacaactcttttttacagatggtcttttctttgggtgaaccctctctttatgctgctcttgaagcaattgttgcttccttcaagaagcttgaagtgatctttttttttctctctagctttcagaagactttttctccaggaatggagtacatggtggtaacaatgcaatgtatgaattattaggaattgcaacatactactaatgtctgtgtatgtgcaaaatttccagtttattcaaagaaaaatcatgaaattttatgttttgaccatatatgacaacatatgaattgatgaattttaatcaatggtatttactggtctcatccaataggacaaaacaaagcaaatagaatatttctccataaatcttgtatagtgcaagttaatgaattaataaattctttataattgattggcttcataatgaagtaaagtcctcattggaagacacatgtacacactacatttcataaatcatgactagtcatggtaaatgctgtaattgccaactcctattcagctaatgccaaaaaagtataaaactgcaaaatgtgtctttctagaactctcttagcctttagtagctacctctcattaggttctgtttccctcctgctcttcccccatcaaaatgaaataatgtgttccatttacacctaatttattcattgctttcatctttaaacaaacattattgagtgtttacttcagttactcaatgctctgtgggatattggagaagcagagacragaacattaaggtttcagttgtgttgcctatgacagaattacgaagccatgtgacaagcatccaagtagaggttctggttgttcttccatatgaacgactttgtaytgaatgtttattatatttgcttttatttttaatatttaaagttaacatactgtaaaacggacttttctggtgtacagttccataaagtttaagacatatagagattcatataaccaccaccatagtcaggatatagatcagtcagtcaccccaaaagagctgcctcatgatgtattccactgtagtcaaaccctcccatctcccaacctctggcaaccactaatcattatagttttgtgttttcaggaatgctatataaatggaagtatacaatgtgtagtccattgtagatggcttctttgactgaacactacacctttaagatttatccaagttgctgcatgtatcatttatttgttcctttttattgcccagctgtatttcattgtatggatgttttagcwtgtttacccactcccccattgaaggatatctgggttattcttccagtttggggcaataatgagtagagttcctataaacattgatgaacaggttttatgtaataagctttatgtctctaggttaaacatgtaggaatgggattgctgggtcatatggtaagtgtatgttcaccttcgtaagaaactgacaaactgttttccagaatggtcgcaccattttgcatttctaccagcaatatatgatcattccagttgctccacacccctatcagcacttggtactgttagcatttgggaagcatatgtccaagtcttttgatcattttttaattgggctgtttgttttcttcctgtgaactttgagagttcatcatgtattctgcacccaaggcctttgtgtgctttgcagacattctctcccagtrtatatcctgtcttttcattctcttggtgatatcttttgtagagtgaaaccttttgacagaatccagatgatttttttttttctttatagagttgtggttttggtattacgttaaagtactctttgtctaattccaggtgaatattttctcctttgctttctccctaaagttttataggttttctattttgcatttagttctgtgatctattttgagttcttttctatgagatgtgccatttagcttgaggttaatgtttttgcatatggatgtccaatgcatttggcaccatttatgaaaaaattatcttttcctattgaattgcctttacaactctaccaaaaatcaattggatatacaaaaagtcatcccttagtatccataggggattttttccagagtcccttttcttagattctagatgctcaactccctcatataaaacgggtatttgcatataacctatgtacatactttcatgtattttaaatcatctctagattgcttataacatccaatacagtacaaatgctatgtaaatagttgttaaatgcattgtttggggaattgtgatgagataaatagtctgtacatgttcggtatagacaaaaccattctatttttctgaatattttcaacctgtggttggttgaatctgcagatgtagaacccacagaaatggagaactgattatacacacacacgcacatgcacacacgtatacgcacacacagacacacagatccagtgtagactctattctgtgccattgacctatggcttatgcctttkccagtgccatattctttctattattgtacctttatagtaactcttaaaatctggttgcattattcttccaaatttattcttcattgtcaacactgttgtggctrtttgagttcctttgtcttyccatacacatttttagaatcagcttgcctatgtctccaaaaattytactagaaattggatgactggaattatattgagtctatagatcaacttggggaatgttgatatctttactgtgttgagactctcagttcataaattctctgtgtctcttcatttattttatttgtccatcatttcttggtagttttttgcataaagattttatacctattttgttagatttgtgcctaagtagttcatgtttttggagccattgtaaatgtttttttttttttttttttttttttttggtgtgtttttaaaatgtttgtttccaattgctcattgttagtatatagaaatactatggatttttttttycttttgatacagggtctcactctgtcacccaggctggagtgcagtggtgcgatttcagctcactgmaacctctgcctcctgggttcaagtgatcttcccacctcagcctcctgagtagctggggactacaggcacatggtaccatgcctagctaacttttgaagtagtgtggagttttatatgttgaccttgtatcctattggccttactaaattcattttttagttctaggagtttggtagcatcctcaggattttctacatagtccagcatgtctgtgaataaggatacttttattcctttctctctcatccttatgccttttctttcttttgcattgttgtcctggctaggatttagagtacaatgttgaataagagtgatgagagtttcccttcttgctttctttctgatattagggagaaatcattctgtctttcaccattagattgattattagttgtagaatttttgttgaagtgttttgtcagcatatctggaaaagattagggtattatttgttctttatatgtttgttagaatttaccaatgaaactctcagagccacaagattttttcctctttcttaagctataaattcaatctctttaggagttgtaggactactcaggttatctatttcaccgtgaatgagttttagttgtcttatagttgctcgaagtatttgaggaattggtccatttcatctaaaatgttaactaatgtatgtagagttgttgtatttctttctctctttcatgtctgtgaggtctgcagtacaagtcctcttttattcctgatattagtaacctgtatctttttcttctttgtcaatcttggtagagatctatccattttattggcttttttgaagaattggcttttgttttactaactttcttggttgtttttcaatttgcaattttattgattcctgccctttattatttccttccttctgcttgatttgggtttattttgctctttttttcccatttttttctaaagtggaatcttttatttatttgcttcagtatgcaattgactcaagttcaggccacaagttttgactaatcttctaagggttgtggttacaacgttagttttattaccaaagtctttgcattgctattcttatctgtctggcttatgcatgactaagttgccagtatgggatctgggtggagttctaccctgtagttcagttcccaaagtctatggtctggtgtttagggctagattcatgtatttacagcctagagataaacacccaagagttcatgaacatctttatggagttgttttctgagttccttcctttctgctgtcatccctggtactttctggtctcttggggcttcctttgtttggkccttgtgccagaaagctaagggtttagttacctcactctgctgcatactgcctgtaactgtgttcatgtccagggccaaccaatgataacagaaagaaaaagaagcaatgatagtttctgccactctcttggygtcacagctcttgtgattagagaggaagcccctcttccctcctaattttaggtgccagaaggctttgtcattgcggctgccagaaatagtgaaaaggcctgagtagtgtagtgggagaaaatggaggggggaaaaaagaaagggagatccttttccatttctttcggcattcagagtcccttcttttcttagagctggagcacaagcattttgccagagctctttctctctgctcctggtgtccccttttgggctttatgctgcctggagtccaggctggggcttattggagagagagggattggggagtttactaccaatttgatagtatcttaaaatctgatgttcttcaccaatctactgctatcgtttacttttcaaagttctcaaatagctgctttatgaaacctgtccacattgtatagccgcatgcagtggggaagaaataatgctgtgtgctgacccaccttcaccaggataagatctcccctgttttttgaagcagagaactatcggactgcatttcttcttgcccactgcagtgactcagcgagtgtcatagctaaattcagcaaaacaactctgcagagacaccagtgtattttgaattacaactaacatatgttaagtgtaatataccatcttgcacagcagttgcaatttaaacataaacaggatatatcccactgctaaattgtgtgggtctgcttattaccttgggaaaagcaaagttagaaaccgatccatgaagaaagtatgaattgtcatatttgaccactgaatatgactcagcattccaaaattccttgtgataaatgaagacttcttggtaaggatgaaagtaaattgatttttgttccaggaagaaagggaattttattaaaagcaagggaaatattttcgatatattaaaatkttttatggttctgttttaggttgagtttaagaattttatttttataaaactaccaagacagagcaaagaacctttgatcttcacaattgaagaaaacataaattagccatagatggctaaatgtttgcatgcctctggccagagaagtaaactagaagatcttttgaaaagctttctaaaattctgtaattctattctacaactagtcacatcaaaacttttgttctaacatttacttgagtttgtataattatattatgaaaggtctctttattctgtttacttagttgtggtcctacaattagaaaataagacttgatttgtgttattcagaaccctctttcctttyctttcctctctttataaactctgccacaccttaactctttaaggaagtaacaaaaatgataccaaagtggaaatttacatgcatgcctttgtaaactataaggcttacctctaaagcagctgagatgatccatcagatatggtttgcctcaatgaattaagctgctggtggctaatacacaaccttcctgagagtctgagaatgaatcgcactcatgggccagtggagcctccagaaatgtgcttcatgtctggggcagaaatctgyccagattctgattcgtggattataatttttgaatcatacctcctggacccaaaaaccaatttcgagggtaccaaaacagcctaagtacttcaacttgtgtgattaggtttgttggtcatgcttttgttattattattattgtatttctaggtgattatctctgaattgtaggattatcgataatttttttttatttctgtattttctgatggatttccatgaatggggagtacttctaaaaagggaaaaaaagcagaacatttcatatttttggaagaacaggagagaattgctacattcgtagaatttaaaggcatgctatttgctgaatcttaaggtcggatagtgaagtgtaagagttagcttcaggctacctggaaagcaaagctatttgctctctaaacttctgagcaaaggaagatgctaaactttgcccatcgtctcttcttccttcctctctctcccttggctcctgaatttcttgggtactcttactagtaatttcacttcagactgtgcacagtttcttgactttcagtcataccatcatgtcatcccttctttcctcttgttatgccactcttccctgctagttccataaaacagacatctgcaatggacaattccaaagaaaagaaataatggttacttggacttcagctcatgccagtttccacactttatctctcagtttccatgagagcccaggctgcaactcggttaatgttgttttttttttaatttgttttgaattttttaaatgaatttctcccatgagttccctcactctgcctgggcttccattccactctgagaggtctagtgacacaaagaaaaggggcagtggaagcagtccacgggtctgtagccagagcgtcttcctccttattctgcaacccctctttccttatggtaacatccttctgatttgagtatctgggggaaccctgcatttgtctgtgtaacatcagccatgtattaaccttttgcatttcagtttttcagatatttaaaaactgcagttggtccttcgaattcctatcagctttgaagttctgttatggtagaattcaaagcatgatcttagaatcataagaaaatctgcccyccaaaaatctgtaacatgaggtggatgagacttgctatgggacaagacagcgttgtccttggttctgagtactgggcaggggggccgggccctgttcttcattggtaagcatagttcatgtctcaccttcctgttagcaagaaccaaagtggatttttacatttagtcagagacataatatgtacctaagcaccttgctctgtgatcaaatttaacaccctactaacttctaaggtcacagttgctactagtctcattccctagatgagaagacagagaacaagaaatggtaggaaacttgcctatgattgcatgctatacattgataaagttgacatcgtagcatttaaggcatttatctctgctgtcaatatcacttctggtcattttcttgtgtgtgcatatatgtatgtatatttatctctattatttatatattttaatccaatcatattatataaacttttaaaagaaacttgattatgaagaataacagttcaattctgagtgttgcaaatgtgtgaatctttggtgtcataggtttatagttcaagtgttgttataataaaatttcagaatgacaaatttcaggtaaaaatagcaccactaagtaatttgaagtcttttagaatcgtaaggagtggcatttgaactgagaaacaggcttatcaggaaatgtcatgctgacatccacagtggaggaatcgttcctgtgttcttatattagtaacagtccacccagagctcggcaatcagtccacttatgtaaaggcgcaatacacttagggccccttccacatttaacattctatcttattgctttcaaatttattyttagagrtgaattatttatgtcctcataggtgtagaaatagtcttaccactcagcacttttcatacagtaaaaggttacttcaaaagtgcagcggatatttactgcgggttttgttgcmttgagtgtgcagggaataagggagctcttgcagaagtcagacttgggggtaaaggagaaagtttgcaggaaggtttgggggtagtacatgtgccaggtatgtttggcagggaaaaggagggggaaacatttatgaaatttttaaaaaataaaaataaatttcacaaatagaaatctgactttagagatacaattagtccaacagatacaacacttgttttttagatttttctatgtttttaatagataagtgaaaattagggtctgaatagccagggcggggatatcaaattgrcagagattcccaagccagattgaaakttttgaaaattaaaaattagatttctctcattcttccattatatatctttttataaacactagttgtaggattagaacaaaaggagttagttctttttgtgcatctttttagtagatacctgtatgagtttactaggactgccataacaaagtaccacagagtgggtggctaaaacaacagaaatttatttcgttacagttctggaggctgaaagtctgaatgaaggtgtcagcagggttggtttcttctgaagcctgtctccttgtcttgtagatgctgtcttctcatgtcttcatatggtcttccctctttgtctgtgtccaaattccctctttatataaaagacactagtcatgttggattaggctccactctaacaacttcatttaaacttaattacttctgtaaagaccctgtttccaaatacagtcacattctgaagagctatgggttagaacttcaacttaccaatttgggggacagataacttagtacataacagcatcatactggataaatttgattgaattttagttatatttctgtgtcaccctctgaagactaaactttgtgtatattatttatataaatattttagttgtttaaaatatttttttattaaagggtataaagagagctgaagaacattaccctattattcataacagattttccatattaattatatagatacaataaggtgattgacatctctggacccaaattcackttctgtaaaataaagtggttgaacaatatgtactttaaatttttgttcaaatctgaattcctaaagcatgattatagtaaaaacaatctgcagaaatacatgcagactataaaygggaaggaaaaggaatacttttgttagtctttgtgagtaaaatatttatttaaaaatggactccccacccagaaaacaaagcaaaacaaaaaacctaaatatttttggaccgaccattataactgcaatgttattaatggatttactgcattcaggaaggaaaaagagacatttcaacttttactccagtactagaataagaactgacattatcctctgacatatcaacaaagaaacctagatgttcgttttgagcgttccaaacaaataatccaaataatccaattattttggattactttgctgaagtggtaatgaagtgtgaggtgcgtttcatttgtaggagggcttcaatttaattataccaattccactgagttttgctggtctctcataacaccctgaaacacttccatgaaatgaaaagagtacattttaaaaggcataaaaagaaagtactcgttgatgctacatttaattaatccctagaacacatcacattttgtgtcagaaaatgaarttctatacatgattcaccaagttccaaagttatagctcaggtatttgactgaaatagaaatacttttcatcttgggccattataaaaattaagaaaaaagataaataaaataaaatgaaagtaccattggaagaatcacaaatggaaggaaaaggccaaagcctttcagtcttataatatattataaagacctatagttgtatttattttgaaaaagtaatcacttagaccttactgctcttaagaaaggtggctatgtcctctaattgggacgtgattatgtcatttggctkgatgttattttgttgtccaggaaaagtaaaacaagtatgttttcttgagtaaaagctcttgtcttataaatacattggtttgctgcctttaatagagacttgatttactttaatgtggtaagtgaaaggagagaaagaaatggaacaagcaaaggcactccarattattttcacattctattatgatattatcaataaaaccattattttctttctttttcattgttttctttttagtatttgtagcatcaaaatatctaactattttgtgtttgtttctccttcatccaagtaatttattttatatatttactttcatttttttctgagacagggtctcactctgtggctaggctgaagtgtagtggcactattatagttgattgcaatcttgaactcctgagttcaagtgatcctcccgcctcagcctcctgagtagctrggacaacagktgcatgccaccgtgcttatttatttatttaaaaaaaagtttttagagatgatctcactatgttttcagggtagtctcaaactcctgaattcaagtgatcctcccaaaatgctgaaattacaggtgccactgcacctggccccaactgacccattagtccacccattaaagtatattctagggaactctttttctcaaccttgctatcaaattttgtaaaagttatttttgttgatgaataattgttatattgatataattattgtgtgattcttttaagttctgttctagaaatgtctttattctgtcatttttacaaagacaagaagaatgtttccaagaaataagagcagtttataaaatccctcagtcattggatcaggaattagagaagggaaatgaaaggtttcctcccagttggctaaatgggctgaattgggaaagcgggagggtcaggtttagaggactctcaattattccttcttggatttccgacaagaaaccttgggctggtgggaacacatctgagctactaataggagctgaagttcccaccaactgtagattgatgaacagaaatatggggccatctatatctctttccagagccaaatgtagctccccactgaggattgaggaccttggcaagcaattgtcaacctgtccaggtaaaatattaattacctactaatgaagaaaaacaaacaattctgcaataattttttctctgatactcagattttaggagagtatatacattgtttcataaaatgttttatgtgaagggctaaaaccatttaagaaaatgccttttatgtaatgccgcttattgtcaggtcaatccttactttttatttccattataaaaacaaaacatgctcttcccttgactgagcctgtttcctagaaatgcagatctactaccacacaatctgtagagtagcttttcagtagtaatgcgtcctgtagctcatacattccattctttctatacataattgggttatgtgatttccccattttaagatagcaatatctgttttcacttcatcattgcttcatgaattttggctactgttttttttgatatttttatttataacacattctgaatctttgattttttttttctattggtttgtagatgaaatgtgttcaatatttaaagattatgtgtagtctattttggttaaaatgctgttttaaagttacacatagacactcaaatatcactaattaattygttaaagtgcttagagttactagaggkttagcaactataccagtagttagaagcctagtttcagtgttcttcatggttggtatgaaagaccacaagtgttttcttctgtgaaatgacatttttaaaatacgcaaatcataacacttcatccacrcccttttttagcaacgaaagtgaatttatcggttgcaaataagaacaggaaaatacaactgtttgtgattgcaaatcctggggaagatttttagcattttaaataacaattaagtttaagagatccctctgatacatagaaactgaaagctgaagcagaaaatgtctgtcttcctgaacacatgagatctaaatccattttgatggcttaagagtatcattgtcctcttatgtctcattggttcaagcccaactgctccttgctccactaagtatagtgatgaatggtcctccctccaactgacagtaaaagaattctccatgctgtgagaattccatttagtaccattgattgcaggctatggtattaaaagtaactcatgttagtgttttgtgatagaatctttaatcatttttaataacaaggaaaccttcattacatggatttacttcttaaagtggaaatgattttggcctgatgtgatgaaagacagggcttgagtttttacttgttcccattccaacagttcttaatttttcttcatctcaacagttggaatttgcagaattcttctatgagaatgcatgttacctctatgtctratttccatttgtttctatttcctgtggtacttacttctcctttgccttttattaggatatttgtccaagttttawactccttaagcatgaaagaatgtacaaagagtgtatgtgggaacttaaagtctaaaattcctaccttaaaatacttttttaaaggttgtcatctctagttgccagttcaccaatatcagggcagaagacggcatcttcgtaagacttaaatttgcaataatatctagtaatgagtagaaattcttctcttttgtattaagcaggggcaagccagaggctcaactcgatacctgaaggtggtacagcaataatgtaatgcataatcagtgattttatttcttgtttgttgcttttagttatgggagtaggtttttcctttgaaccaaattsttttgagtggtcccattcaggccaatgattctggcctaatcacacatgattaggtgtgatgaagaatgtagtcagatgtcagaaaaaagatgtttttctcatcgcaaatttaggaagtccatatggggatcagtaatttaacacatattgaaaacctcatattaaacatatgtagtgggagatttaaagataactatagttgggcatcctgtccttgaagagctcatgatttaatggggagagcaacattgtcatatcatgattacatttatgttttaaacagtgtgcagtgtgatgaaatttttggatgcatggggcccaattagcctaggtgcaagatgatattarcttggtctaaaggggttttagtggaaggagcaaagaagcatacgtatttgaaagatttagaggaggataaaytgcagcagagagaaagaaggagcttctggtaacttagttggcaaaccagaagagtgttttgaactgaattccaaaagtaaagagcttcaggcagcagggagttaaccacagtgtggaaggctactgaaaagtgaagtcaggtgaatttaatatgcatggataaaggaaaaagagaaagtaacaatattgtatagtcttatggagagggaactttgagtttctggggcaatgagttgttcagtggcttaaaaaataaatctgtgactctggtaataaaaagttataacatggccgggtgcagtgactcacacctgtaatcccagcactttgggaggccaaggtgggtggatcacccgaggaggtcaggagtttgagaccagccttatcaacatggtgaaaccccatctctagttaaaatacaaaattaactgggtgtattggcacactcctgtaatccaagctactcaggaggctgaggcaggacaattgcttgaacccaggaggcagaggttgcagagagccgagatcgtgccattgcactccagcctgggtgggcgacaagagcaaaaagtcataacacatgtatgtagggatggatccatgtaaaattccagaattggatcaacgagccagtaacagtgatggcattcactgccacaaaaggaaacaggtggccagaagaatttgaaatatcattcaaggttgttagtatgtctattttcctttaaaacaaaaatgatgaaactgctatacttgttaacctgctctgcaatgccactgagggaagccactgcttgcttgttctatacctttgcttccctttaaataccatgaacacgacactgaacagaaaacacactctagaataaccatgtggtaaattagttatgggagtaagtttttcctttgaacagaattcttttgagtggtccctattctggccaatgattctggcctaatcacayatgaaaaatctatgctcaaaagcatagattttttttattttaaaaagttttgtaagtctgtggagtacaagtgtaattttgttacatgcgtagattacatagtggtgaatcaggccttttagggtatctatcaccaaaatagcatatgttgtacccattaagtaatttctcatcattcacgctcccctaagcacagaaatttattacaaatttccatggaggctttaaaattttaattacaatgtgactttgaagatctccagaaaatttaaaaaataatttctgtktcagccaatgtcataaaaatttattgacatttgatgcttatagtctgtttgcaatatgttagccatcaaggcagcaaatatttctttgatatgcatctagctttggtggttaatgtttgcactcttttgacattagtccatgtgactgattatttttgtaacttaaaagccaattccctaaaaatggtggtagatgggctaataaatagagactgcagagaggaaaatttagactgcagggagaatttgcaaatgattaaggtagcctgaacaaagactaagccacttccattagcatcttactgcttggtgaggatcaagcagagacttagaatagccacttgaagatgcagtcataggggcgtatagaattagatggaatagcaaatactgaattagatgagatcgaagattgcttttgactctataatgcttccatgatgatcttataagaagggctggaagaatagctgcctcaaataatttgtaagctgtaacatatcctattacctcctcacaaatggatgtcttagagactgagaacttactcaacttccatcaaaaaagaattaataacctctgaaggtactttctccaggaaaacatgttgggcagtgggagtgcatgactgattgctgctaatgtgattttggtttatgcttggtttaagaatcaaaaacttctgtacaatgtgtttcagatttccgaggcattatttaattgaagaacaggtagttcagaaaaggtttacttacttttttgatggggacatctaccatttgtaggttcttctgtctttttatttgtgtagattctactggagataaaaagtgggaacataattcaacatggatttatttcctgatccagaggtcaaagracagaaatggatgaccaaatcagttatgactttttcacaaagggaaaagcygctagaaagcagctcagaaatgctccaatgccaagctgtgctatagcatcagaaccatgtacagttgcagaggaatttgatttccttgcattcatttactcatttgttcaaaaacatttattgtaagcaacatggaccaggcattgttctagctgctggagctgcaaagaggaggaagagattcatagtgtgaattcatagcctttcacactgtgaattcacactataaattcatattttaataaaactctatttataaaacgagccagttcaaatgaattctattagattagttagaaacaaattttattatatctagattatgatcaggtagaattgcttgaaagaagttaaggcaattcattattactattaaatcagggctaaagggtgaaaggcagacagagttatgcttttctgtctcataaaagaaaaacaactmtatatgagtagcaaatgcctggttgaattacaattatttataaaaatcaatgtttctacatagtgcgtgttacaaggggcaagccttacactgaactaagaaatgttaatgaaaacaggatatttataaggtacwaaatgtagaatgattacataactttaaggatcttgtctcaacatgagttaagatttatattcataatatctttaaaaagtaaaaaaaaacttgcaaacattcaccatccctacttgcattattgtccaaaagactgtggatagcgacattccactgaatcttgtatccctactgatgttgacggatgcccattctgctaaggtttcctgtctactaagtgctaattagagctgcaactctggcttcagctatgatattattatctaggactgaataaacaatataaggcttatggaaattgcagaagcgctagggcrataataatagtaacaacaactattattatttttgaccacttattatttgccaggaaggtgctaactgccttatatatgtctcatttagtgctcactacatttctattatcagtcccattttcagatcacaaaatggtttaaagaaggtaactttagcgttctgaccatttagattggaactwaattttttgaccatacgtcttgctttatccacttgctatcatgtcttaatattaacggatatcactcctatataattcatgtttccagtgacagaatgagttaatggagtccgtggtttaaaagtgaccctggagaaccaaaacgctcagcccatccactttatccataaagagattaggcctgggtgggagattggatgagaggcgtctcttatcagtccgagaggaatagtgtatactaaagaaattgatcaaaaggaggaagacgtttgagggcactagggaggaatacgactctgatggattgaaattctacatgggaacaattgaaaaagaagctattggcaacatctacaggagagcagagaatagcaagattaagtgtaaattgaatagcagtgagtgttcagggagttgtcttaatggaaagtcagtctacctcccttccaacatctcagggtaaaaggtgtgtataacatggataagggaagctgtggcatggaggttactggaaacccatctgagtgattcaacaagtgctcttattatggttcttgagaaagtgttcatgggagacatttgggaattaagtccagagccacgaacttccattctgcataaggatctcaatcacagtgttgcagagaattggggtagtgacctaaacctgtcggcttagtgagaaggcgacaggtttaggtcactaccccaataggaaagggaattcacagactgctaaatcccttctagggagtttgagatgttccatggaagccgggtttagaacccctgatccagagcctaatcagtatggcagtatcttgtggcagatgytggcaggaaggcaaatttatttttacccaggatgtttgtctcttctttgctctactaacttcccagacaaaatttaaatttagcaaactaatggcagtgctattccccagactccaaagaacagctttgtcatcctctaccttcagtcagccattaatgggacactaatatattttgacataaaggtatgaaattgaattacttggctttcatttaatctctatgcacttcccccgactcccccatgttctagctgtctgttttcatgtttttagttgrccttttaaaatactaggtgggagagcacccagaagtgtaaaatgtcatgccaccagccaagctagacaatctccccccagaggtagcccagcaccttgtcagaaatgtttagggaggttccttcatgtgctctaaacattttccaatatctggcagaagcagcaaatgctgttgattattaggtagaaccttatctaggagaacgattttcagaataattattataatgataatagctaaaatctattgagcactgacaatgtgccaggcatttttctaagcatatcacatgtattggctcatttaattctcttaatatgcctatgaggtggatactgatatcatctccactttacctatgaggaaaatgaagcatagagtttcctgattaactaggaactggaagaactttacttcaaatccaggcaatctgacttggagcctgagctcctcaccactttgctgtgttgcctcccatacctgctgtttacaccagggttgcaaatgattcgagaaggtttaccattattgaccctggggtctaatgccctagaatttgctgatgagtctcaactgggacatcttttgataggagtttaaaaaagaaaacagataccccgcccagaagactaggtttaagtaagctgctgctagtgggaaagtggaaactgttgtaggttgttgggaaaagatgggagctragagcaagagagcaaaagtgtaggaaagtggatgggagaaagtgttaagyggtggttagagtctgatttcttctgtcttgcttagctgatcattctggagatgaactgagatcatatgtgaattcatttgggatctataaagtttgattcaaataatagtgtcttttatgccatggtgtgccccctggaagttagggtggagtagtgggtggccagaggttcaggagacaacagtgcatgggttggaatcagagggcatagatgagaacctgggaggacatggcacagggagcagccactttatgggttttgagaaaggtgatacacactggtaagccccaaattggggagctccaggaaggggagtccaggaactggtcagcagtcattctccaaatctcatttcccatttgcaactactgcccaatcgaggtcttagtcctgatacctccagcccagtagagaagactgaagcccactgccattagatttactatgatctcaaataattgcttaggtagagttcattcaacctctgcccctcctcaacttctcctattagggtctgataggccactacattctatggttccagcttcccttttatctgctgtgtgtgcaggaaaatattttctaattacagtctttgcagatcagttgagtgaacttggaaataaagggattatcagacccctttaatttggggataaaaatctaatgtgaacaccatgtggtcactctgttaattgcgtaaattttttcctccctacttgcatctaattcctaacactctttgctataggccttatttttattcttgtcctgcattattgtttatttacatatggacgtgcttttaaaataactatattaattccttaaaaattatacttgatataaaataatgcccaggtttcaccacacagagataacaacttgcaacagcttgttggacgtgtctccatgcacttctcttgcatgtgcaaactcctgaagtccacaatttatatgaaggagcttatgccatatataattattcatgacttttcttcacttcacagcatgttgtagccacacttccctctaaatgaataaagacctacacattcatttgtactctctgcccagtgttctctggtttacttaaccaccccgcctgatgattgtttattgataaagaaagaaatctgagcagcacacagagatcatcagactctgccaatccagactttatagttttgccgtcaaatccatgggattcttggtatttatccattgacaagagagtctgaactcctcagaggagcagagaaagaacatgaaactgatgagtgaagggtccaaggctttgcgtttagcactgctacttagtggctatgtgaccttaaaatcacttcacctttctgaacttcagtttccctacctgtaaatgatattgtgagttttcagtatattcaaggtctgttctactaactgaaggtctgtatctataaatatactgtcaagctgtatctccaatcacaacttaaatgcttcggctttatttgtccatacctttttgatgtccagcactatggtaatacaaagtaaatacccaacaaacacaatttgagtgatggatcggtatagctgttgaatctgtcttttcaaatttcccccagaaatatccatctctgtagttttatactgatttttttaagccagtgaacctcagacatttttacctgcctaccatctctctttagaatttgtgcatgtatatctacacttttaaatagccacagtttaaatctctctctctgtctgtgtgtgtgtgagagagagagagagaraaagagagagagaatgcaccatgtgtgagtgtgcacatatgtatctatagtttgatatgtatgtgctattttgggtgagtaaagtgggattccatatggagggagttactatactttgcactaaaatgaggctttagacaacagaatgagattatttttttactccctcttccagagttttactgaaattaaatgggtgtgtgtctgtgtctctgtgtgtgtgagtttgaagtgaaggtagagaggggtgtcctaatattgtagacacagtattcccttctttcatgtattctttcttatctttcctgttttccttctttccctccctcattctctcccttcctctctccctccgtctttctctttctttttttctttatttctgtttccttctttccttccttttcctcctttacaggaacaaattaaagaataatgccattctttctactttagtcaatgacgttagtcagtggtgacttttgtcaccatttaatataaaaaaaaagagaagcctctgtatgagaaaattctctcaaccaatgaaatcccagtataaggtcgtattgaaagacaagtaggtattttgttatattaatatattgaagaaatgtattgacccatcgtggtggtgatgaaaaccaaattattccactcaactaatgcccaagattaaaccactttcaaaatatcgcttaagaaaatcaaggagtcgagttacagacatttggggagtgaatagatgttcagaaagtttggtgctgcaccattttattgcttaatatgtgtctggagtcagtatgcattgaattctttcaaaatgagttacgcacttcattctcttcctaaagaaaggacactgtacatatttaaacatttttcttcattttggaatgctcagagccaccattacaagcagtgtttattgcaatatgctttgactgagaggtgctgtcaaaagaggctattgagctgtgtagagctacttcggtctcaaccctgtggcttctggactcttggtctgctttttaaagatagtttttccatctctctgagggtcaggctgcccctgaccatgtcttactgtgatgtgcatatctgcctgtggttcttaaagctccactccacctcccactatttcagatttgctgaatctaatttattatgtaacaagcacatgatcttattaaatgttttaaaaaatcaatagaaaatacgatataaaagtgggctccaaaggctctttytgcatatttcyatattcttatgtaaattccagaaacttttggtttctggagaagtgttctccagatcactgttcaattctgataaggaacccacctttctggtttgaatgtgaactcttccttctaaacatgaagagacaatattgcccttattccttcaggtgcatggctaccaattccgctctctcatttgtatctgaccactcggttcttgttttgcagtccccagtctgtcccagatcgtctgaggatccgggtgaacaaaatcagtttacaagactatgaaggattccactatgacaaggagaaactccgagaagcttgtaagttggaagtgcctcattgatttcatgcgatcagcctrtcttcagcttcttgatcctccttggtttgatgggtagattcatttatccttgtgcctgaaaatcatggttagagaagtgaagtgaaacacagtaacatgtgggctccaagtgataatgtatgggctacagaaaaaggaactggaaaaggaaagcagctgaataaaatcattctgctgtggatgccaagtcaggatctcttggcttattcgccactttagtctcagatttgcctaaaatgaggaaagcaaaaagttcgtgatacyaatggtatagcaccatccagaaaactcttgagacaacacagatctcttcttggaggctgcgttatcaaacactgccctcattcgtcacagagatgtggcaaagaggcacattcagcacttctagatattatgctattatataatgtcagagaagggcctacgggaatgttgtgatattaaagtgattcattgatgatgaggtgccattatttttgaaacctgcacttgagtcgacgtatgaattacttctcaaagtttgtattttctgtatgcttctttsaatacatagctaattgttagttcatctcactagtcaatcagtatgtattggacactttttacaatctggtacattctgatcactgcattaaatctgtctgtataataatttakgaggtaattggttaaaataagccagaagttaagaccatgagagtgttagatattagggttctyggctccttcctaattgtgggggccaatagtcaactgcaataaagtcaaagaagataaggaaaactggtgtccaaggraataggcaatgatgctgatataaagaaatgacttttatatggaaccaaagacttaygaacccagtccccaaatggtctctaagtgtagacctggctacctgtgtaaaagaggaaaatagttagaactggcaggattaatagtaggaaagccttcctgggatggtcttttctgagctctggtttctgagactgatctgaagtaagctttagtggatggaaattctgaggtccaaggataatcccaggggtgggtacagagggttctacaatctggagttgccacgaggtgaggagccatatccctggtagcctaatcactgaatctactagagaatttgctgtgaattttctttcttaattctctcagmtgcttcagcttcctaaaccctttatgttgttttccttagacatcaatatcttttaatttctccccagccttctcacttccatactttaccctcatttccttttataggaaagtgtgagctggaggaggagcaattccccaaacctctgaatttcttccttctgtaaacaacatattacattttctaatctaagtgaacttataagcgacagactagcatataatctgtttgatccataaagtgttagacatatatttttgcgatgggaagtgtagctacaatgcaaattaaattgagttctaaaggttactaatcataaagaacagtgttttatgttctttcttgtttgaagcttccaaacaaatagctaacagttcttaaaagaagataacagatctcaaataatattttgcagcttacgatcaactctgaagaaattcaatttggagtggggacacatttgaaatttttagctgaaatgagatttgaagcttatttatagctttcaattatctgttttatcttttctgtggcattatctgtctaccattcctggaggtaattgtggtttgaggttttccaacaagatgacattttctggcaagggctttactcagcatatgtgataaaatttctatgtgaagaaacttcttaagtcaaatatggcataaatgtaagccaaataaattgaacagtgtctttgggaccccaaagaacacatatactctctaaaaggggataaaggagttattctaaagatgtaaaaattcattccaatgatttggatttgaagaaaacaataaaagaattggaattaaaagtgaccaactcaatcattctacttttaatatgcggtgatggtgcttctaactgtggtttttcaggaaagtttatcctttgaggttctggattcactcctactaacctttactcttttgcctggttccaacttgaaacagaatacagattcatgggaaggctgacagggctcaaactgagtataaagacaaaagcaagcttaagtccatatatgaggtgcatgccaaaataaatgttatttcagaagcattaattaagtgaaatttgcacaacacatctagataaaagggactctaggaatgtactctgacctgcatcccagaacaaagagagtgaatcctcttaggtcattcatttattgtcatcaatgactgacctagagcagtagcatggtactgcgtttgaagttagttccatttcttgatggtgtgccaagtgatatcttcaggcagcatgtggttcttttccatcactgtttagcagaatcttgctcattgttcccgttagataacaagctcgcatgtttgtcacctaacaaagcccatcttccgtccataatgcagggctccctgacaataatggatggcagccctttaaattgctttgcttattttagcacagagaaagaggactatactctttcagatatttcccattcctcttccacttagccccatctcactggggggcaatccttctaaaataatatcccggaaaaatttagtccttgtcaatctttccctcagctcttgctggtaaatttcagacttatgtaagacactaaaagtcttcctcactccataggatttatcaaccctcagataatagttgtggtttgcaagaggggacagtctattcaacttaagaggtagaacataaagagaaagtggccatattaaaaaaattaaagcaaatctgtaataatgatatcagaaaatcactctcataaacagaagtatacaagtgggtccttaataaagcttataatcatataatctaggcaaaggatgatctgtttttaaaaatctgttgtatttctaaccccagaagagattcactgacacatgatatattttttaaaaatctgagataacttgatattcccccaaatttaactctrttcccatgcaaactggttaaacttcagtttgagcaccagtttattctgcacttttaaattgccatgataatttacacagatctagggtttaaaacacaagcagtagaaaccagcttgaagccaattgaaaacagatgtagtctataaggatagggaattaacatttgttgtatatcaaatacagtgtttgacaatgcttttacatacatgatctcagtataattcagtattatctggatgtttataacatgtaatgcataatatatcaataaatagggtamaatcctagtatcgttagtgttaaccaaactaggtatttagttaagcatttgccctaatggaatttccttgtttggtgatttagtagaaaagtcagaaattttggtgtttgaatctcagttgaaaccttgacaaagtcatttaatttctctgatgatcaaatctctcatctgtaaaatgaaaatataattataaccccattcagtgctgagggttaaatgtaatgctgtatatggaacccttggtgtgaagtctggcacattagtgtgctctccaaaaatggtagctatgatgcttgtggtggttgttgttagagaggccctgctgtcatactgctcatcagtcttcaagtccataaaaccagactcaaagtaggtcatagaggctgacttcctctatgtagaactcttcctggcttgaggcagctcacttcaaactgcacacaccaccaccctccaactcactttcttactttcaaaaatagaattgaaaatactggtaaatatcacagaaagattatgggaagaaagtgtaactaaatcattcaatttacttttattgtgtctacttgtgtaaacatctgctgtaatgacaagatacttaaatctatgaagcatgtaaatactgaatgcccatataggatgatctgaacgtttacctgcaaatttccttccttaagtcctaatacattctcttaagtgtgtcatctgttatccaccactgaattttttgcaacaaatttttattttggaataattttagatttacaaaaaagttacaaaggtaatacagggcattcctgtgcattcctcccccagtttttctcattgttaaacactttacattaccatggtgcgtttgtcaaggaaactgatattgctacattactattaactaaacctttggaatttctatcccaggatcaaatctaggataccatattgcattgagttgtcatagctccctagtctcttctgatctgtaaccgtttctcagcgttctttctttttttatctttctttctttctctctctttctctctctttctccctccctcccgccctctctctctccctctttctttccttctttctttctttctctttctttctttctttctttctttctttctttctttctttctttctttctttctttctttttcttttctttctttctttctttctttttcttttctttctttctttctttctttttcttttcttttctttacttttcttttcttttctttttcttatgaccttgatggttttgggggaatactgcttcctgtagaatatcttccaatctggctttgtctgttgttttactcataattacactggatttatgggtttttagaaagaatactgtagaggtgaagtaggctttttgccccatcatgtcaagacttatgtgatatacacatgacatccctggtgatgttaacctgatcatttggtaaaggtggtatttgccaagttccttcaccatagacttacaattttttccccttccctactctattctttaggaataagtcactaagtctaacccactttcaaaatgatcagaggaggtggatcaagattttttaaattgtttccagtttgcatatttgagctcaactgaatttgttaactatgccaaaatggtagagccattcaaccattcatgcattcatactttcaataattacatgtttgcatcagttatatgtcagataccacactagatgttagtcattgaaagatgaaactagaaaatccaacattataacataatttattcagtgtacctttattgagtccttaccgtgagcaggggttggaagaaaaaaaaacaacagaattcgttcctgattttctggagctttttttctttttttaaaaaatgtgataataactgtgatggggctatggaaacattctgtacctatttttctagcaaacgtcatttaaataatgaaagaaagataaaatatataagcaagaatgagaaaatccagtctaaccactaattaagtgtgtgaccttgggcgatgcatttgtcttcttcaggcttctgtttccttatctgttaaatgcagtagttaaactagacatttcttaagaacagattataatataataaatgtttagttttatagaaattacacaggattaaaaaatttttcatcagcatatttccttagtagagtttttaaagctccaacatcattcataatgagtataagcattagaaaccatgtaagtacattgtgcttcaagagtttgctaaaaacactgattttttttccctatcaatagcttcatctaaaattgaatctttccccctcatttaacaagttgacaacagggctgttcagtagagattaggcctccatttggtggaggtaggctttccaagttgaaatctgtctgaggagttaaatgatgtcaatttgtcctctgaagggcattgtccttcctttttgcaagtgtgtttatgtttattcctattttcacgatttgacatttacccagagtttcgtgcttagtttcttttactgtcttttcccatctcttgtctgtctcttatatttatcattttattaaaaatataataataataatggttaacacacatcgtactattgctgtgagctaggaaatgccttttttacatatattgtgtaatttaactcacccgacatctcagtgtgatagatagtactgttattcccatttcacatataaagcaattgaggcacagaaaactcagacagtctaaggggctgacattttgaatacttatttaatcactgtgttttctgcttcctccaagtagtacttcctatttttcatataaatgtctttaataacataagtaaaaatttacatgtcagtctttcacaattccatttcaaatgtcttcttacatttaaactgactttgacttagtttatcacacycaggtttgttggacaagtttctgtttttggatcttcctccaacctcaaatcagccattcataaattcaacaaatattaattgactgcttaccttatttctagtactatttcaagtatttctagtactatttcaagatacagaaaagtgcttgccctggaacttatgttccagtggagagacagacaattgaataaataatacaatatggcagcaagtgctataaaggaaagtaaagcagaacagtgacagaggatcctgtttttgataaggtggtcagcaagagactttctgaagaagtgacatttaaagagagaccagaacaaaaagagtgcatgtatatgtggatttctagaagagtatccctgggcagaggaaatggcaagttccaaggccaagcatccttagtatatttaatgaatgtcagggatgtccatgtgactggaacctgcttagttgaatggagatagtcaggaagttcttttaaagggtcagcacatggagggggcttataggccatggagaaggctttggattttattcaaagtgtaatgagaaggtgttggaactacttgaggagtgtatcatgcctgaatttattctagataaatttggctactaggtagaacattttcaggttgcaatgatggaaatagggcagcaggtaccaggctaatgtgatactccaggtgacaggcaataggaatgagagagttaaagtagtagagttggagagaatcagttggattctggctacattttggaggtaatgctggtaggatgagatgatggattcgctgtattgcataagagtgtaaaattcagttgcctctgatgttttgaccttggcaacttggtaaatagaggtagggaagatgcagaggattcagcaaaggagaccaagaaggagcaataccaaggaggagcctatggttagctacaaaaacagcaggagagcttgttcattggaatcagagagaaaaataactcataaaagctgtctagctgtcagcgtttcagagaagttgagtaagatgcacactaagaattggtagttggattggagtagagggtagttagtggtagcctcacgagattgtggagtgaaaaatgtgaaagtgcatagagaggattcgtgtgcaaatagggtcaagtgaatgtcagatgtgagctgcataatgacatcttgatcaatgatggactgcatatacaacagtggtcccataagattttattttattttattttttttaattcttcagctaaaaccgcrgaagaggtgatttattatatggttgttacactcggccacaaataaacacagaaatagtccagaatgtcacaggtccagggcagaggaccaacatgggcattttgttyatgagcaaggtgggtctcagaggtgatcggcgatcagagggcgatgaagttctagatccattgagacaagctctagacagtagcatgcagtcccacaacttgtaccagcatccccagcgtctggcattccatgtttctgctcctgtggcctccacggtgcaacaagctagcggtttacttggacctctgcctcatctttcttcttttgcgcttcagcctgcgcattcgcttcttcctccacttggctctcatggcgcagaggtttccaaaaaaatggcgctaaggccgagagcaagattttaataccatagttttactgcaccttttctatgtttaggtattttagatacccaaatgccattgtgttacaattgcctgcagtattcagtacagtaacatgctgtacaggtttgtagcctaggagctacaggctataccgtatagcctaggtgtgtagtaggtgattccacctaggtttgtgttaagtacactctatgatgttcacacaatgaagaaatcacctaacgacatgtttcttaaaacacatccctttcattaaatgacatatgactataattcaccacagattgctcttttaaggtatttaactataaaactaaggaaagaaatgggatgatgactataaaagaatatagtagaatcaaaggaggattcttttttttaatttgtaagataatacagcaagtgtgtatgctggtgggaccaattcactagagagagaacttgattcagaagagggccaaatgcaggagcagtgccttcgagtaggtggtaagatggaacctggtgagcaatagaaggttgtgggcaggaatgtggggcaggttctcccgagtacagccagagaaggcagaggagggagtacagatacagatagcttggtgtacttggtgctagggagaaacagaagttctattctgattgcttttattttctcaggaaaagaagaagcaagcttactagttgaaagttggaaatggatagtatcagtgttctggaaaaaaagaggaaggtttgaaatagcttgaggagagagacagtgacagggttcggcagaattgctgacctttactttggaaatggatgattgaattcattgtttttttgtaagcacatagagcctgacttgccggtttctggctgtcttggtttatagatgagcctactctatgtctttctaatttcaaaggactctgatacccggggaatattgggccaaaatatgatcttattattaatataaacttttttgccatctaattctgtttatgacctaaaggctttctttctttataagaaaataaaatatgctctggtgctgtgctatattagaagttaataatgttagatttcagacaaagaactgggcctaaaatgatgatgatatttgatccttccttcactgttaaaacttagcctttgscaatgagagcaatcaattgcaggtagatccttaagtctctgcccaaaataatattttctcttttcattggtttattttatgtaacacatactcaaaattatggccaactcttactatttatagaccagcctagtccatttggttgctgtcttaccaggttgacaactctggaatgtaagctcagatggtagttagacttccctttgaagactttcttctaagatctttgtataaaattattactttcattcatcttgctaaggtttgagtagtgcagtgttggccattgcagagtcacaactatcctgtttaataataaataataacatccaatcattgcatagggcttcatggtttacagagggctgttgtatacactggccacatgcatcattacaaggacacttaagattgccttgcacagggttacattgctgtggtgggattttaataagaaattatatattttctctcttaatccagggcactttctagtatacagcctacttctttataaagacaaatttaaaagaatttgcggtcataggtcttgtcatcatttgagtttctggggaaacagactgtgagactgagttttgtgtacaagggttttattgaggatttcccaagacggaaccacagctgtgcagggcaagaaaagtgggaccaggaagagggagatgttgaactttgctgtagtcacaactgaggactcccacagggacctttggacctgggacagccattttgagttttctaaattgaggcaagggttattggacacagatcaggctctgccctggaaggggataaaccttgagtgaggtagcagcctttctggagaaggactcagctgtgcgctatcagcaaacttttagcctctgggaaaatgagtgcctcaatcctaacatgaatgcattgcttcagttccgaaagcagagtcttgctatgtattaataacctgatttttgaactaaggccaagaaagagccacccacataccaaaatccttgagttcattcattcaactcttcatttaacaacgatctattgaacacctactatgtatcaaagactgttctaagtgctggaaattcagcttcagtgagtgctagctctgaagtgtttctcttgttatatcttttaacctgatttccctgctatgccaaattcagggaattggagtacaagttgattattcagaagtgtctgaattagcaaagtaaaatggaaacctaaaaggtgaatgctgacctttccttaaaagttctttctgatgaattattgccaagccaaatattctccatttggaatttgagtaattaaaagtggaaacctgaatataaagccacctcaatttctggctgtcacttctagtctgacgctatagtcagcagagaaaacttcagagtttgattctcaatgggatgtgtattttttatatattcatttcttccttcactgttaaaatgtagcctttgctaataagagcaattcattgattgaactaaacagaatcaagggcggaagtgtaagctaatctgaaaataacatctttgcagattgactcagaaccacaattttatgcactagttacgtggataaaaacttcaggctttccctagttcacactggtggaaaacagtctttctcagtaccgagtgggtttcctgaatcactggtccactgccagtctcctggagtcatctgtaagcagaattagagatgtccccaggctgtcagctgctagggatgtctttgtttgagactgccctatttcacatctcctcatagaagctgtccatgtataatttgtttattcattttatttcccaaaagaggcttggggccccttcagctgattttagaaaatttttctgtcatgaattcttcacatgtatctaatcaactcagaaattccaggctgcatgactgaatgtgtccccagcatctagttgttggtgaccttgaccatcaccctgcagtgtaacagacagcatgatgtagaaattgtgaaagagatttggaccagtgtatctaatcatcatttcaagtattgaagttttaggtatggttgtgaatctttcctttcagacatgtaatatttcatcttgattttcagatgtatctggctagcctggccatgtagccaagattccagtgtcacagtcaagcctttgttatctccctcccaagtacttgagcactggtagtaaatatcagtagtggttctttctgtgtctaagaattttacgaatattcatttccattgtcaagggcatgctaggacctcacagttaaaagcttatatcacatttaacaccaggaataattgccaaaagattatatacatcatcttgttgtactagtactttattgcatgcaacattaggaaccttctttgaaatggaattatcttcatcaaaagtaggcatttacatcattgtcattaaacttacatattcagttggacaaggatgacatgtcatagcactatttggtctggacctttggttcctactatgtattagaagagaagtatgtgggccttctgcccatacttgctcctggataaccacggtcaatgcgtgaaccgcagtcatcagaagtaggaaaaaggccattacgaacagcatccatgattggatctcatgctccacctgacaacttttgtctttgttcagaagaccaggctttaacatctcctttttttttctccctgggattttctttctcatttctgcttttccatttatcatgtcatgaatgccaaagatttggaaagagaaaaagaaaaggatctgttactaactcctgaggggttgtgggctgggcttcgatgggcacctggagagtgtagtgttccctttcattctctttcttctgttctttcttctccagccttcagaattttctttccccaattctgtctataacacattctaactcagaaaccattttcttgtattttaggtgttatcaaactgcctttgaggcattgacaagtggtctttgtcctccatcatcacagttttcactaattttacattattttcacagtctctctgctgccgccttctttgctcttttttgctctctccagctcagcaggccacaagtccatggtgttaggtaagtgtatcagaaggttgtaacccccacagctatgcaaaacgacttcactgtcactcttgctccttttccctcttcccatccaactggccacagaggagttgcttccttggacttcgtatctctctcatatgcccttcccttcttgtctttctgccactcctctattccagacctcaccattgctcagctcattgactgtattcgcttcctcactcatcctccagtcactcacctaatttttcatcaatttgtcttccgtattactcccaatgatttttctaacattttgtccaagaaaaaggtgggagatttttaggcactgagatgagcgagtggaaaagtactggaggatgttgtggggaggttggtcaattgccaacccattgtatctgattattgtcatccatcaagtaagaattgtagttttttgataaccttggcacatttgaaactaacagaataaaaggaaagattccacttgtgtttacatcctcccttaggaatttgtttcttttctctactcccctgcctctcctccttgagttccttatttccaccatccttttgacttcctgagtaatgtgaatgctatgagtaacaaaataggtactgataattgttctatgtcaggatgatctcatcagcaaagtatctgtccatagcaaactcagaacagtttctttttcttttccctttctcttgatttttctgtaactaggcatctgtgtttgctaattgtctcttattaccaataattatttaggctcttacccacccacagagcctgagagaraggggctctgtctttcatgatgtttacatttcaaaaaatgacttctagctcctggagaaagacattcctgggttgtaaaatttggcatgagtctgggagcagatttacatacatctcaaaggggcagagaaaggatttacaatggaaagtttgctaaagtaaatgctctaagaaacaagtgttcagagccatataatcaagaagaaacctgtcggccgggcatggtggctcaagcctgtaatcccagcactttgggaggccgaggtggacagatcacgaggtcaggagatcaagaccatcctggctaacacggtgaaaccctgtctctactaaaaatacaaaaaattagctggacatggtggtgggtgcctgtagtcccagctacgcaggaggctgaggcaggagaaaggagtaaccgggaaggcagagcttgcagtgagccaagattgtgccactgcactccagcctgggcaacagagtgagactccgtctcaaaaaaaaaaaaaaaaaaaaaaaaaagaaacctgtctaaagttccatcatgctaagggaaacatgaaggctgttttggtcagtatacatctggaaccttcaccttctgttggaaacctattagtatctacccatccttttgagaataaagtctcaacttcttagtataaaaatcaaacctctggtcttagcctcaccctactctactctgtacctacctaccttcctaattcctgaacatttccttttcttcttttcatgctgtggttccttagagcctaagggtggtctgagataatttccttttgtctcaaaaactcttgttccttttgtcaaaccaccttattttcttcacagctcctcgtggaagagtgtctggtcttggggaatgtgtagcccttctggattctaaacacgtggagtacatgtctatccaattcctgccacaaagatatcatcagtaggatgttttcatgtactcccctcctcctccaattctgtaaactccttgagggcaggtaccatgtcttactcagccttctgtgaccaactgctgacactagagttgtccccagcaccagaaagtccttaaaacccgtttgctaaaatgattaagtgaatgacttatagacgtgaaaaatattgtggcataattctttgtatatgcaatatatatttaccaaattaatgaagatagaaaccatgagttgctcttcaagattatcaatgccataagcatttaagaggattttttttaagtgagttgcatgttccttatgttgcccacttaggtagtatactatcatgataaaagcagaattggatctgtacttggaaacccaaatttctagagaacctgttagtttctggaaagcactcagaaatcttatccttgaatagaatccaatgaaaactacataatttacttttatcttgtggatgacatttttaatggactatagacaggacctggtttagctcaagctagggaatccaaactctataattacttttaatcgtaaggactaggagttgtgaaactgctgacaggtcccagacatggcatggcaaggtataaagttcttgggatgttatgtttccttttgaatgctaatatgcccattcgttgctccccattggttccaggtgagcagtgggaaattaatgatraccaggtggttgtaaaatggacctgtgacccacagcagggaaaaactggattgaaataccatattgcaaactgattctatctaattcttatcagccatcaagtaagaattgtagttccatgataaccttggcacatttggaactaatgaggtaaaaagaaagatcccacttgtctttacatcctcccatattatatttcctatagacaaagtatctgtctgtagaaaactcagaacagtttctttttcttttctttttctcttgatttttctgtttctttttaactaagactatttttcagagcagttttaagtttacagaaaaagtaagtagaaagtacagagaattccatatatcctctcaaccctcccctaccgcaacctatccacacacagttctcccctttattaacattttgcattaatgtggttcatttgttactattgatgagccaatactgatacgttattattgcctgaatcccatagtgtacgttaggattcactcttttgccatataattctatgggctttcacaaatgtgtaatgacatgcagtcattattgtattgtacagaatatttcacaaggaataccttgtgttatgtcttttcatttctcccttcctctcccaagcccttggcaaccactgattattttattgtcagcatagtttttgccctttccagaatttcacataattggaattatacatcatgtagcctttcaaattgccatctttcacttagcaatcttcatttaaaatacccctatgtcttgtctttgctttatagctcgtttctttttattgttgaataatactccgttgtctgggcataccacaatttatctgttcacctaccaaaggacatattagttgcttacaagttttggcaattatgaataaaggtgctataaacatccctgtgcagatatttatgtggacataattttcaactccattgggtaaataccaaggagctgatgctagattgcatggtaagagtatatttagttttgtgagaaactgccaagctgtctttcaacgtggctgtgctgttttctatttccaccagcaatgaatgaatgttcctattgctccacatccccaccagcatttggtggtggtggttttttttaattttagccattctattaggtgtgtagtggtatctttgttgtttaatttgcaattctctgatgacagaaaatgttgagcatcttttgatgactgtatttgctgcctatattttctttttgtcagattttgtttagatcttttgcccagttttttaattggctctcttattgttgggttttaagaattctatgtattttttgggtaccagtcttttttttttttttttgcatctcttatggattctttgttgtaggctcctagatgtggattgcagagttacagaacatttaggaatactagtacctactgtcaaagtgcacaaatttacactctgaaacaattgatttcatggcacccttgccagcattgaacattattttttaatcttattttaaaagaagtgaatattctaatttgcttttatttactaagctttccccctgtattcactcacaatttgtatctagggtaattctcctgtttcaagacagaatgaattagatatgacatgaaccaactacaacagcataaatgagatggtttctctgagtattttccattgctcagatctgattattgatctggtgagccttgctgagacraaggttgagcttctcaatgcacgttctctccaagaggtaggagagtatcataaggagaaggcatcattatgtccatgtgggacaaccagcttccttctgtcctgtggcctcagtcttttcttttcttttcttttttcagaaatttgtgcaaaatttaagatcagttttctttttgttttttcttctatccctcccccatccccccacccccagaaaggccccagtgtgggatgttccccccctttgtctatgtgttctcaatgttcagctcccacctatgagtgagaacatgcggtgtttggttttctgtccttgtgatagtttgcttagaatgatgggataccagtcttttatcagatacgtgttttgcaaagattttcacccagtctgtggctaatttttcattttcttaacactctcttttcacagagtggaagttttgattttaaygaagtctgacttaaccatttttttctttcatggatcatgcttttggtgttgtatctaaaatgtcattgccataccaagcttatctagcttttctcctatgttatttctatgttattttctagggaatgggttttttttaaaaggctattggtttcttaatactatgcataggttgattaaatgataccaagtacttgcataaactctattgattatgttagtaaatctaaaattgatgcttaaggaaatgtcaagtttttaaaatgtgtatatacatagtgttaacaagcttattctaagatgactatattttgatggtttaccatattgttcaatacctttcctattttctgactttttaattctgkgattatatttattgttcttttcagaaggtgataaccttttttaaaaagcctccacaattcatatatatatttaaaacttaaagcccagtctttgcaaacacagtggtttctgagaagcttttctctaaggtatcacacgttcttataatgatcctattgaagatagtttgtttgtgctttgaataggtcaatggcttcatatggctgcaattctattttaacagtaattgcactgtaacagcaatgtcacataattaaatctttttaaaaaaatgctgagctctcagctctttatttccacaatgacatcttgttgaacacatcatggtaccttgcagagaacgaattaactgctgtgwgttttctccctttttataaatcccattatcactttcacatggacttagtgtgaaaggtggctctttctgctttggctcttagggccttggcttgtgtcatcaagcaggcagctgtgattcccctcatctccttgtaggtttggttgattcttttatttacatgctttagtttagactctagagactttggcacaacacattatctgctataaaatgttctcacatatagtctgctgaaattggtttgggaatttatgaaagggcagtacatgttgataatagaattaagggtaaaaatgatgaattaaataaggcttagaggagtgaatataggatggtttttataggtaggacttaatcttcacagtaacccagtggggtagataatatgatctttctcagtacattgggcctttacatactatattgtaaaagaaccaaggggaagctaagctcattgagcaataaaaataatcaaaagtatctggaatcgtaattttcctgaatgtagttattgaccaaggataattaaacattaaaatgaatggtatgagaatatgtactatagcaaaactaccaaattgataatatcacaggctagccagactgaaaactaatactgttaagtaaacacaacatcaaaaatccttgggaaacacctttgaatagcttgtgcctctgatgtcatgaacttttcacacctcaagtgagaacgtgggttttgttttatgtttggtttgtgttaactgtcattgaggtcttcagttcagtattggaaattctgttgtaagaattttaatagcaaaacaagtcacagtgattttctgtaataatcttgattaaattctaggtactcttgttatctctattgtcccaataataattagcatctgctcacaattgtatagttgcatttctttgtaaagtaagcaatacttactttaattctgtgacccctaaattacagacaaggttatatagcaaggctgtcagcagttttgataagcttgagtcatggtctataagttcacctgaatctggcctatcggaaaaggagaggaatggggagcctttaaaaatgaccacatttctgccaagtatgttcacgagaatgtgtctgacttcactggtagtttctgagtctgatggttctggtcctttgtccaggcctggagatgtttcctccctgtttacagcctttccctagtgcttgtgaagctctacatatgggactcgtgagtccatcctcagctgctggtcagcctgtcactggtttgtgccttcacttctctgagctcagtgttgaaaactagtagaaactccatccttatgtgcagcccaagttcaatggaaagtaggaatagttcagaacaggggctcttgagtaagagaaacctaggatgaaagctggtgttccgttttagtggttgtaatatttagggcatgttatctatctgagactcattttcctcattttaaaaatagaaataatgacatccatctctcaggattgtggcaaagattaaataacacagtaaaactggtatattatttatgtgaacgtaggttattttttctccttcctccttgccctcccttcccctttctcctcctctccttccttgttcttcctcctcctccatcctcctctctttttcctccattttctcttccttctcctcctttttcatatcatgtaatcagtattatcattttcatgttcatccatatttgttccacccctccctaaatttatcatatgacacaatgctatgcaacatgacacacaattatgtatctttaatatcacatggatttgatcatactcccagatcgcaggcaatggaagtctgttctggcttatctggcttttccagaagtgtggagtatgattcactcacgtaagaaaataaattacttcagctactctgatccttctctcaatgctacttccttgaacccccaggcttaggccctgtattagtccgttttcacactgctgtcaaagacatacctgagactggggaatttacaaaggaaagaggtttaatggagaaccaacagttccacatggctggaaagcctcacaatcatgggggaaggcaagggggagcaagtcacatcttatgtgaatggcgacaggctaagagagggcttgtgcaggcaaactcccatttttaaaaccatcagatcttgtgagacccattcactatcatgagaacagcatgggaaagacctgcccccatgattcattcatctcccaccaggtccctcccacaacatgtgggaattatgggagctayaagatgagatttgggtggggtcacagagccaaaccatatcaggctccaagcagctgtgcccaggaaaagtgatcctagctcaattcagcatctgggagctcatgtagttggcatgtgtgttaacctcagagttccatctgttgtgaattttcattggcctctacgcaattcagcacaaagatgctgtgctaaaggttgtgccagaatgaaatttgctttagacatccctgggtagggcagtttaacctcagagtcggtctacaagggtcttttggctttcttcaacaaataattcacttgaggaaattatttgactgtcttttgcatcataccaactgaatcaagttttcttaaaactctacactgttgatgggaatgtaaattagtatggccaccatggacaacataatggagcctcctcaaaaaaactaaagatagattaaccatatgatccaggagtcccactgctgggtatgtgtaggtacaaaagaaaggaatcagtatatggaagagatatttgaatgcctgagtttattacagcagtattcataatagtcaagatgcagaagcaacctaagtgtctatcaatggatgaatggataaagacaatgtggtatatatacacaatagattattgttatgccataaaaagaataaaattctgtcgtttgcagcaacatggatggaactggaggacaggatgttaagtgaaataatccagacacagaaagacaaatagggcatattctgtctcatatctaggggctaaaaaagtcagtctcctgaaggtagagagtagaatagtgattaccagagacttggaagcgtaggggtaaggggaagtgaagagagtttggtcaatgggtgtgcaaatacaggtagatagaataaataacctttatggttctatagcacaggtgatagtagttaataataatttattgtatatttcaaaatactaggaagagaagattgagactgcttctaacataaagaagtgataaatgcttgaggtgatagattgcttaattaccctggtttgatcattatacattgtatacacrtatcaaaatatcacatgtaccccataaacgtgtaaaattattatgtatcaataaaaaattaacttaagaaacaactctaggcacctttcattgtaacctttaacaacattggtttataaagctttgggcaattcagtctcatatatagggtccctgagcttgatttattatctggctgtttacaatttgtggtgaaatctatgttttataaattatattttgttatgttttatcttggtgtatatagactttaaaagttttttatgaatataagagtataattgtggattggttgctagaagattttgaatttgctgaggttgaatagttttcatttatgcattatttggcataaatttgcataataagttcaagtagtctaacttcaagtatagaagacaaaattaattagtgtgacctgtgggcattttacttcaaacgtaaaatccagagcatgcacacgtaaaatgtataatggatttctcaaccaattaatttaatcacagtctggattatgagacatttaaaccaacaggaaatagggaaagagggttaatggaggtcaggttgaagccatagaagggtgctagggcaggacttatattttggctggaaaggggtaattkgtagtataattttctcagggcttaatatcaccagtaaattccacagtgtagttcctattacctgaatttgtcaaagcttcctcgttgttttagtctgctctggctgccgtaacaaaatactatacattggatggcttaaataacagacatttatttctaaaagatctggaggcaggaagtccaagctcaggatgccggcatggwtgggtctggtgtgggctctctttcttgcttacagacggctgccttcttgctatatcctcaaatttgtgtgtgttagtccaggttctctagagaaatagaaccaactggatatgtagatatgtaacaggacatctattatgggaattggctcatgcaattatagtggccaagaagtcccacaggataccatctgaaagttggaggaccaggaaagccagtggtgtaaatcagtgcaagcccaaagacctgagaaccaggggagctgstggtatatcttccagtctgagagcctgataactggagtgcaggagtgggtatcactggtgtaagtcctggaaagagaaccaggagccatgatgtcaaagggcaggagaagatggatgtccaaactcaagaagaaagaattcacttttattccacctttttgttctatccaggccccaagcagattggatgacacgatgacacttgcccacattgacaagggtgggtcttctttactcactccactgatacaaatgctaatctcttctggaaacactctcacagacacagccagaaattgtgttttaccagctatctgagtgtcccttagccaagtcaagttgacacataaaattaatcatcacagtgcgtatatacaatacagaggtttaaatattagtagtaaaataggcaccggtgtacctgccacttagactaagaaatagaacaagtaccacccctcactgttctactgggataactactttactcgttgtatttgccattctcttgataggtatatatttaccaccaacgtatgcatccctaaaccagatattgagtggttttgaaaaaactaagtagcagatctaaatccccctgtgtaaagaaaaggtgatgctttcacttttagcttaagtttcccaagaaagctgaaaagagtctctagttcattgttgagcttcagtttttctgagagtgcacacggactcattctaagagaacttagtgggcaaggtaatgactgactcctgggcagtccttggcaggtgttaagttgagttctagctatcaaatgaatatattatcacagggaataggcttctttgaatttttctgcttcactatgatccaactcttgctgtcaggaataggttcaggcagagcatgtcagggggtaatatagtgtcaatatattttatataacactcattcgtattgcaaattcaactttattggggcagataacccagtagcttcttgacagatcatgggtccttcattcaactcttgcacttgtttgattgtttgggttatctgtaaaagtcttagaactttgaaggtcttgtttcattgtcttccttactgtatggttgcctttgagaagttcaaaaacattccaaattttaatcctttgtatataatctggtttttcctttctataagcttgtagattcttccttttgtccccagtactcttcaatttcaaaacaagatgatgttatattgttctgtagttattgtgcttggcatttgatgaatcatttcagtttggaaactaatgttttaggaaatattcttcattttgttttttatatttattctctattttcttttgttttttgagactcstattatggggatgttttttgaaactcctcttattgggacctcctggactaggtttctaatttttttagtttttctctcctactttctatctctttttatttttgctctacttttttagagattttctcaactttatcttttaacttttctaatgaggtctctatttattttatcaaatttttattttcaaagggttttgtactcttttattctctgaatgaggttcctctttgttttccttcatattctttgtatcatttaatattataatttttccatttcttggaaatttccattccattttctctcaactccctgaggatattaaagatatcatgtttaaagtgtttttctttgcgcaagttcattttctatttttaaaaaaacttttagattcaggggtatatgtgcaggtttattatacaggtaaattttgtgtcacaggtgtttagtgtgcagattatttcaccacctaagtagtaagcatagtaccagataggcaattttttgattgtcacgttccttctctctaccatcaaggaggccctggtgtctagtgttcccttctttgtgtccatgggtacacaaaggtggggaatatttgtgtcctacttataagtgagaatatgtgatacttattaaatmgatttctgttcctgaattagttcgctgagggtaatggcctccagctccatccatgttgctgcaaaggacatgatcgcatttttttttaatggctatgtagtattgcatggtgtatatgtcccacattttctttatcctctctacccttgatgggcatttagattgattccatgtctttgctattgtgactagtgctacagtgaacatacacgtgcatgtgtctttatgttagagtgatttatgttcctttaggtatatacccaatagtgagattgctgggtcaagtgctaattctgtttgagttcttagagtaattgccaaactgctttccacaatggctgcaataatttacattcccattagcagtgtataagcactccgttttctccacaacctcatcagcatctgtcatgttttgactttttaataatagcgatttgactggtgtgagatggcatctcattgtggttttgacttgcatttctctaatgatcagtgatgttgaacttttttttctatgattgattgccggatatatgtcttcttttgaaatatgtctgttcatgtcttttgcccactttttttttttttgtaaatttgtttaagttctttataggtgctggatattacacgtttgtcagatgcattatttgcaaatattttcttccattctgtaggttgtctgtttattctgttgatagtttctcttgctgtgcagaagctcttcagtttaattaggtcttatttgtcagtttttgttgtttttgttgttgttgcaatggcatttggtatctttgtcatgaaaactttgccaagtcttatgtccagaatgatatttcctaggttatcattcagggtttttataggtctaggttttacatttaagtctttaatccatattgagatgatttttgtatatagtataagggaggggtcagtttcagtctctgcatatgactagtcggttattccagcaccatttattgaatagggagtcctcttcccattacttgtttttatcgactttgttgaagatcagatggttgtaggtgtgtggcactatttctgcactctctattctgtttgatttgtctgtgtgtctgtttttgtaccagtatcatgttgttttggttactgtagccttgtagtatagttttgagtattgtgatgcctccagctttttttttattattattatttccttggctatttgggatttttttggttcatatgatttttaaaatagtttgttctaattctgtgaagaatatcattggtagtttgataggaacagcattgagtctgtaaattgctttgggaggtatggccattttggtgatattgattcttcctatccatgagcatggaatgtttttctatttgtttgtgtcatctctaatttctttgagcagtgttttgtaattgtcattatagagatctttcatctccctggttagctgtattcctaggtattttattttgtttgtggctattgtgaataggattgtgttttttattttgttctcagtttggatgttgttggtgtataggaatgctactgattttttgtacatttattttgtatcctgaaactttactgaagttgtttatcagaaaaaggagattttgggcagagactctagggttctttatgtatagaatcttattgtctgcaaacagatagtttgatttcctctcttcctatttgggtgccttttatttctttctcttgcctgattgctgtggctacaacttccagtactatgttgaatagaagtggtgagagtgagcatctttgtcttgttctgatttttaaggggaatgcttccagattttacccattcagtatgatgttggcttatgggtttatcatagatgactcttattattttgaagcatgttccttcagtgcttagtttgttgagggtttttaacatgaagggatgttgaattttgtcaaaagccctttctacatctgttgagatgatcatgtagttttggtctttagttctatttatatgatgtatcacatttattgattcgtgtatgttgaaccaccttgcatcgcagggataaagcctacttgaccatggtagattagctttctgatgtgttgctggatttggtttgctagtattttgctgaggatttttgcatttatgttaaagaaggattttttttttttttttttttttttttgtctctgccaggttttggtatcaggatggtgctggcctcaccgagtgagttaggaatgagcctctcctcctcagagttttctttctttttttttttttgttaaatagtttcagtaggaatcataccagctcttccttatacatctgctagaatttggctgtgaatttgtctagccctgggctttttctggttggtaggctttttattactgattctgttttggaactcattattggactattcaaggacttaatttcttcccggttcaatcttgggaggatgtgtatttccagaaatttaccaactttttcctgtttttctagcttgtgtgcagagaggtattcatagtagtctttaagggtgttttatatttctgtggggtcagaagtgtcacttctgattgtgtttatttggatcttctctctgtttttctaccattatgtaatgttgttctttgtcttttttgatctgtgatggtttaaagtctattttgtctgaaattatggtagcaacccctgcttttttctgttttctatctgcttggtagatgttttgtgtgtcatcgcatgtgacctgggtctcttgaagacagcataccattgggtcttgtgtcattatctaacttgccattctgtgcctttgaaatggggcatttaacacatttacattcaaagttagcattaatatgtgtggatttgatcctgtcattgtgttgttagctcattactgtgcagatttgtttgtgtgattgctttatagtatcactggtctgkgtatttaggcatgtttttgtagtggccagtaatgacctttcctttccatatttagcactcccttcaggacctcttataaggcgggtctggtggtaatgaattctcttagcatttgcttctctgaaaaggatcttatttctcctttgcttttgaagtgtagtttggctaaatatagaattcttggtttgaaattcttttctttaagaatgctgaatataggcccctaatctcttctgtcttgtagggtttctgttctaaggtcagctgttagcctgatggggtttcctttgtaggtgacctgccccttctttctagcttccttaaactttcttcctttcattttttccttggagaatctgatgactgtgtgtcttggtgatgatcttcttgtgtaatatttcacagggtttctcttcatttcctgaatttgaatgttggcctctctaccaaggttggggaaattttcatggatggtgtcctgaaatgtgttttccaagttgcttgctttctctttttctctttcagggatgctgataagtcatagacttggtctctttaaataatcccatatttctcagacattttgttcattcttcttcatttttttttgcttcatatttgtctgagttattctggaggactggtcttcatgctctgagattcctcagctggtcaattctgctgttaataacttgcagttgtattctgaaattcttgagttttttagctctagcatctcaatttagttatttcttaaaatggtcatttcatctttcatctgctgtatcattttattgtattctttagaatttttggattgggtgttaactttctcctgaatctcgatgatcttcattcctgtccatattctgattctatttctgtcatttcagctatttcagactggttaagaaccattgctggggaactagtgcagtcatttggaggtaagaagactctctggctttttgagttgccagagttctcgcgctggttctttttcatctttgtgggctgattttccttcagtctttgaagttgctatcttttagatgtttttttggtttttgtttgctttcattttctttggtgttgttgggtgtttgattatggtataaggtgggtttggtcaactggcttcatttctggaatattttagggggccaatgctcagctcaacactcctgagctgtgtgctttaactctggtgggctcattttgggccccctgctttcatctctggctcctcagggttaggaacctgttgccttgatgggcagtgacagccaaagagcttcactgggtggtggaagtaagatctgtgctcatttgtacatgccagaagcaacagcagtgtgatgacrtgcatgctcatcagctggagtggggccctggtgrgccaggggcttccagcctccatacaggcatttgcaagtggcagtaatagtgggtgcgatggggcactggcgggtgtggggctggtggtctccatgtgtgcattcacactggaggcaatggcaacatagggcagggagtggggctactgatcttcatttgagtactggtgctaacagtggtggtacagctgggtggatgggggcaggttgcgctcatgctggcagcagtggcacagtgggtcgtagatacgtcccagcagggaagggtaggcaaggtctgctggcacacacacactggcaaaatggtatgggggtggccttggatgagtgcatgccagcaaagtggtacagaggatgctgcagtggtgggagggtgcgggtgggctgatgtgccttggcagaggccactgggctggagctatttgattgycaggcacagtcagccagcgcaggagctattatgcatgtccctgggagacaccccagttaggcatctgcggctgcactgcaagcaggagatgccagcatacaggggtcactcaggtcagactggccctgctctgttcaggtctgacagtttgcctaaggctaaagtttcctaggggagcatgggacgccttggggatgggtatccctggtcatgcttcactgtggacattgctgcaccaaaccctctgggctccacactggctggagccctgcccttaccacctctctaagcaactatcccttccagcttaagtttctgtgggggtcttgtggtctcctcctgccaggattctataagtccatggtgagagtatgtcattccttccctgctcaactcaccactaccccaggggttactgagggccaggaactgatgwatggtagcccctgcagggtttccagcttcctcccccttaaacccagcatctgtgtcctttctctagccattctcaataccttccttctgaagatctgcttagagtgtgccagtcttcctgatgtcctggtctctcgatggcagatgttccttctggctgtgtctgttcagctatcttgcctggaggatcctgtttattttgatctttggcttctgcattagaaaaatttctcaattttctgatcacttttgcctttctcttcattattaaaagtgggaaacataaaagctgcctggaagttctgagctcatgcataaagcttattgacttcaagcttcgatgtgggggaactgagtgaactgtttcttgggaatgatgaatcagtgctgtctttagacctatggaagaggtgcttcagctttcgatgtcctagatatgtcccatttctggctttgccctgcttcatgggatgatttgtctaaagtgctaaggaaaagggctcatctagggatttctctacccttttctagactgtgctttggattcttagaattcctgccccaacagctccagacctgcttctaggatctgcgtaggcctcttcttctggtctagtctcacaggagtcatgtagagtgggcataggactaaggaaggccctttggggcagcagtttgcatgggctttggagaaagtttggggatgtggtctgtaktatctgtatacataagcacaagktctttcatgttttgaacatccatggagtggaaagagaaggaggtctaactatggaccacaagcactatgttttgttctaatactccttggagtacaagaattatgagtttcagcatctcatttaggtaactacaaaggaatatttatcaggataggaagatagaacatatttcatttaacagttttgggrattaacattaaacttataaatatctagaaatatggaatgcaggtctttatgttcttgccttgagccttataaatgttggtagtgggcctgttctcatgttaatatatttcctcatggttttgtcagattccattgagatgagttttccaatgtttttcctagaaagtaaggttctggctgccagcttttggggaattcagggtgggaagaaaactggggatcactgcagtcttcagatgatcaattaatcttcattttctgtaaggtaactgtgcctttccacaatgggtggtggatatctggtgatctaacatccagtgcttctatcttaaccacctcctttaacctcagctcctgaggcacccggtactgccagtttgcaagccttttgagggttttgcagtagaaattattttggttcatgtctatacccactagtggtttaggatttgactctctaagggctctgagtcagttgccaatttttcatctacttcatctgttattttatccttatttttgttgatttcttttaaaaatctatttaytgtaggttagtagtatttctggtgagagattaatatgtgcatgaaatatgccatcttattctggaacacagcttgttcttttcacttagttagaacttgtgaattccatttaatccctgcaataaaagttccattgtgaaggttgagtattaactcatgcttcctggacttaaacaaagtctctgctaccaaaataagatgaattgttgagctcagggatagtgacactggtgctcaggtgataagtgctctcactactcctaagtaaaatagaggaaatgtcaaggaagcttggcagttggttaaccatagtgtagaaggaaggtggtaatttttgaaaagtttctgctttttcttcgccatgtaaaggcccaaatggaagtgtcagattacaatatttttctactacgttgtttttttacatggcaggaagagtagaagttagtttttagaaaactggcatataacttacgaaactactgctagctaatccttgtagtactatgctaaattaaaagatagatgattgggtatgtctrttttctggctaaagatgctcaaaagatagtgaaaagagtaagggagaataaaaattgatgttttgataatttatttttaaatatagtgttgtattgagtctttacaaaaatcctgtatgacatctattctaaacaccgtagtctttaaaccaaggctcagaagaattgactaagtagctaagttgagtaatttgcaagaccaaagcaatactgggatttaaacccagcagtggatgactgcaaatcctttctactgcatattgccaccttcttggaataaatttgacagttgttggtaatcgtgttataaaattgtggtagagaatgcccttttttctttcttttctcctcgcaattaacagctaagtattgctcaatcaaaagcagttactcttactttgctccttgaagaacaggcaaagttgttgattttatacccatattagagatgaatgacacatgtttgaaaacttctttttagctattcctcttgattccatatcttgaatatacaatctctaattgtagtttaaaatgtctgctatgaagtacattgaatttatacttggaccagactaactccaaacactgataatagaaggaaatcagaggtgttgatgggattcctgcgtatgtataaaatatatctcctaacttaagtaaatggataaacattgattaaaatctattttctatttttgcacatttaatattaaaaggaaatattaagcaagattccaatgtggatgcttatgttaattatagctatattccacttccagatttattatctatgtcaaaattccaacttttcctcatcattcctcaaatattagaaattctattctgctcttatcttggtggatcaacttatttccatctttatagtaggtctagctgaagatgattactctaatcactatttttaggagatctccttattgaatttcccttccatttcctgcaaagatgcatgattgccatgctgaaaactttttgatgtttctgtttatcttttaaaaggaggagaaatattcttttagaatgattattactcccccaaagatatgacagttacaagtgctccttatcctctactgactgtcttttgcttaccttgtttcttgtctaccctggacaggtgacttgcacctgaaagacagactttctcttttgcatccaaacagtcgttaagcccatcttcctccctctttttatactcatttattgaatatctaccatttctttactaggcattggggaagtgaaggtaaacaatccacactcactcacaggcttccatagttccacaaaatcatggatgccttaaagatttatgtatgcaggactttagaaacataagggaatggggtggtgggattgattaggtctccctagcagaaaccaatctaggaggtaacattgagatacaaactctatttctttttctctagaccacctttactcctctagctaaaacgtcaagtgaggcttcatgttcttcagagagcctaaaatctaccccttcacccaggcaagaattagcccctctttcctatagttttcaaatgactaagttaatacatttaatacggcctgtgttatacttatcatttttttgtttatatatatgccttctctactacgtggagattcttcaaggttttttatgcattttaaatcttcttctgtgtattatgaatttttaaggccctagtactttgtattttcagacagatttatggatgatggctttaaatatacactcaatgagtgaacgattgtaaaaaattcttagagaacaccactgtcttatcatttgcttgctacttaccagttggttaattcaaaattttgaaggttttatgttagatcatggatttaatcgtgtaattgtacttttaaaatgagaaatttgtagatttttttttaagttttggaaagaagactatttttcagtatttcaggactcttgtgattctatctgaagtaggttctatacactaaagccactgtgtgtgtttgacactacctaagtaggatattttataaggtgcataacttagtcttgtcttattgttttctgaggtcctactgttaccactcttacattggccatccttaaaattagttggattttttaagctttgcctcttctagaagctgttttttgttcttttctttctaacrttttatgcctttagttctgatattggccaccaggtagcaacagtgccttgagtagctcaagtctcataaataggaaactgttgtagacagacaaaaagatgaagttgtctgcattcaggaaggaaggagtaagtgtccagaatcctcaatktttaattcccccggcactgcatcctcatgttgtctattgcaaatgcaagcataaatttaggcataagcataaaaaatgcaagcataattatcaactgtccatkagcagcctccctgttctgccaatccatcgttactgcgacaattcacttcatctcaggrccagtgaaacacaatgagatgaggggcaggtggcaaggggcaacatrgatcatgctaggaaagtgtgtgacaactgcaaacaagaagagactgaaataataaaaaaggtgtagggagaaagtacttctttctttttacggacatatctaaaaaacccataatatttatgagattgttttttaaccaygagaaacacatttatgctgatatagaaaaatcaaatatgttattttagatttttcttcttccttcacccttagcgatacctctgggtattctagttgtgcgtggagactgtgatttggagacttgccgtatgtacatagaccgcctacaggaggtgagtttatttagccaattttttattctcctcaactttccatttttgtaaacaattaccagccatatatatttgcttctgaaatgatgcatttggagaggaagtggaaawgtggtggctttgtccttcaagcatacgctgtatgtcaccctctcccactgtctctgttgttcactcctcagatggttgaaatgggaaagcattgactacagggtgctgttgccctggtgtgttccataactatagcttggaacttgtcattttaccagacacatacctgtatatttgagatgttcagaatttcaacagggactgataaataatgaaagaaaacagtgatatttaatgttttgtgtctgacacttatgtcagagacagctagattttgtaaacaaaaaaataaataaaacttctatgggaaagaaaaatcctctacatctcataggaatttgtcagaacacaaaagaataatctatttttttttctcaatctagtcttgctttagagaaacagaaaggaagtgaccccgtatatggcactcccataaatgtgaactgcaccagcaaagccaggagacccaaactcatcattacaattgttgttggttgtttttgcaaaaatttgagggggagtcttaacygtctccattccacaaattgcaaaaagcatatatgacgatttctttatcattttttttgatgaaagatgtatattagagtcacttttcttgggtgtggcctagacatttgtatttttaaagctgttgggttgtcttgataccccttgataagcaattctgtcccagacaacatgttatacataggtaaatattgtaaataaagtagacacatactgtttaaaatccctctgagttgtaaccacttcaccctgaatatttgattctgtttytyttggtagaaataaattcaggggagaggcacatagtgatgtgaaaaattactgattttgagaaatagatgacaaatattgaatactgatgtggatgagagaaagatggtcaacaaattttacacttacggcttcattaagctattttgactgaggatagctgcttaaacaagttaaaatacgtgaatttttagtgactcaggtccaattctgttaatatgttcccaaacttctagtatctcatttcccaaaataatgtttgtattttgctgtggaatctcactccagaaacctgtaatgaaaaaaatgaatcataattggtaccaaacctttttacctttttttaaaattaacacatgtagagctttgttaacaagacttcacagtagaataatattaatacacgattgatgaattgactttgttaaaaaccaacttaactaacttaatagcatgcttaatgcaccaatattcaactaaaagtaggatttttaaaaaagaggcaactcaacaaataaagaggaaaaatttttaaaactaatggaaagtaatgtgatgaaaccctgtgggaaacaggtgtaaggacaaaggtacccaggattgctgacatctgtgaatagaatcactacactcattagcaaggaagcctaggaggcatgacaatggtgacaagttcgttataaaactttatgaaaggagtcaggctttcacartctgccagtaaaacctcattaatttcaaccctgttaatttgcactttgtgataatgtggaggtggttggtgattttctctttgtagtctatgaaaacccctatttgctaagcgacttatcagtataaacagttaccatgacagtatgtatstggtctraggtaaagaaaagctttctaagtgtttaaagggatttccaaagccttcttcacaagccaaaagtttatatgcacattaaatataatccccatttatcagaacaaaattgcctgtcttttacttctggtctcctctatargagattgaaataataatataacacttactttaaacactatgtaggacttataggtttcaacagcttaatgaccttctctcagtccagcttggtttgattttattatttctggcattaccttctttatttaacctttatgaatttgggtgtgttcgatactttccagatgagcatagtaatattaaattgggagttcagttgagattgagttgtggggcagcttgttcaaactaattttaaggtatggattttttttttcattttctcattaggacctacagtcagtttcttctggctcccagagagttcattaccaggtaacaaataattgactctccttgtttcttaccttctggccaaatgaagtccatctttcaattaatgtctyattttgatttagagttcacatcttccctagggatagagttcattctaagaatctagtgaaaatggtattctgattcttttgcattttcctgattttggaccagcctagtctagcacaaatttagactgtggattttctcctagatcatttagaaaagattataaaattgagtgctttcagtaacaaataccagaaaactcagctgaaactagcttagcaaggaaagggtctcttggttcacataagcaaaaagtccagatcaaggtggatttctcatcccatttggtcatggctcacactccactttcctgctggtccttctactttgttctcctcttcctgtcaattttacctctgggctagatgactttgtggtccaagatgactgccattagcaaccaggactatgtttttttccatcatctcctgaaaaagagaattacatgcttcctacaaccatcaagcaacagttttaaaatgtaatctgagtggttcatcctgggtcttttggacaatctaataaacccagtctgcatctctctatggcccatataaagtctgtaggagaacactcagttattctttatcccagcagactttgggggtgcagtttctttccaacttccccatcccacttgtgatgcacagatctcttcagccatcctcttatgcattagatttctcagacatgatgtagatcctagtacacagtattactcccgactgcaaggagcccaaacaaagctctttgactggtctcattaaagcccttttatctgaaggctccttaccctgccctgttaagaggaaaggtatgtgggaatcacagcatgccaacaattctctccaaataaatctcttcaaacccttcatacttccatgtggggaggaatataactatgcctaaatttataaatgtgaaaatcctggtttagcacttcactttggatttttgtgtctattttcccatgcctgaaatttccaatttaacatcctttaacataaatagaaaacacaataatttaaagaaaaacctatatcttgtagccttctaggtattccccctaccaatgataccctctgtccttggctgaagcagcatatcttcagccttaatgacaggaatggcctttgtgttcttatttgtgtatttatttctcaaacaacgtatcccacacttccagagttctttcttccatctgtctggccttgaaaggaagaaaagtcacttaggatatgtttacattaaaaacaaaacaaaatgaacttcttctagactgtttttaccaaacactagaagacaaatttccaccaaattttttagatagagcacaactttcatcagagtgactatttgcatatttacccagagccactatcttggtgtaaattttattttaaaaagcatagtgctttcacaatagcaaagacatggaatcaacccaaatgcccatcaacgatagactggataaagaaagtgtggtacatatatactatggaatactatgcagccataaaaaggaatgagatcacgttctttgcactgacatggatggagccggaagccattatcctcagcaaacttatgcaagaacagacaaccaaacaccacatgttgtcacttacaagtggtagctaaacaatgagaacacatggacacagagaggggaacaacacacactagggcctgttgtaagggtgggaagaaggagagcattaggaataatagctaatacatgctggttttaatacctagggtatgggttgatgggtgcagcaaaccaccatggcacatgtttacctatgtaacaaacctgcatatcctgcacatgtacccaagaacttaaaataaaaattaaaataaaaaaagcatagtccttttaaaggtaagagctgatctctaacaattggcagtagtagttataagactatgaggatattgtctttaagagtttatactttttcctcttggacattttgaacctttaaaactttatcaaaatatgttagatttatcctagctaggtttatgaaactacttttatttattattcctggcttataygatgtagtcatttttggtgtgagagttaaaattgtgggtattttgtaccatatttttttatgccctatctgtaactattcatggagatcaacggatggataagatactacaatatgagtgagttatgtattgcatgtattgtttggtaataacactcagaaggattaatgatatttttctatgtcaaaatattgctgcattattttgtttacttacagtcaagtcaaatcttggtgtcaaaactgctgcattataaatgccacatcaaaaggttttgtgtgctgaacatctaggataacgaatgcagtgatcagggatgagtgtcagaggtgtcaccttttcccatatccttccttaggacaaggaaggcgcaagaagagtgataaaaatcaggggactttgagcatgaaggartggttggaacaaaaaagatccaagaagcccagaatttgctcattaaacaggaaagaaaaagagactgtgttagaactaacgtggccagagcacagggagaagctaatgaggaatttcctgagcagggcaaggagaactggttgaagcacgaagctgggagagataaactttcatgtttggccaagatcatcaaaggaggaatgagttggaggcataggaaatagagttctgtgttagccgtattagttttgatatgcctgttagatccaagggggttggtgagtaggcagttgggtatacgaatattaaacctcattaaaaaattcaggcccagagatagaaattttggagtcatcagcaaatggatgaatggtgcttaaaactacaaggccggaggagatcacttagggaggagttcagttaaagaggagggcccactgttcyatctatgtttattcatgagtcaagaagagtgcaggttcaagacagcaactggtcaagaagaatcatggaaactgagataagcagcagggaagctggaaatcaaggagaaggtggtatcacgaaagccaagagtgaaatgtatttcagagaggaaggagtaatggacagtgtcaaatgccattgagaggctgaaaagatatggattgatttccgtatttttttctaggtgtgtgtattataaaacacatgggatataggtgctattaatttttatgtagaaagtgactggcaggaaatttaatactaaatcttttatttcttagtgcagaaactgattacatcagaattccctagtttgtcccggtgggagtaaggagtgttataggtgaaaaagaaacatgaacgacgaaatgccttaaatgcctgttaatgaagtttcttgtctatgagatgacattaaatatgcttggaggattaactgtgaagagaataaattaataccagtatgtttgaaaacttgagaaattcctgtcagctcactaatttgcagctagggttttagctgactgttttctaagaccagaaaaatctcaagagaaaagcagcatttagaaaggtgtacacgtgcccaagacaccttattagtgagccatgtggcagtttctcgccacttaagcatttcattgctttggtttcttccttttccaaatgcatagtgaattgccaacaaagcactgaagctcaaaaatgacacctcatgttaacctaacaaggtattatgggttatacaagaatgtgttagatatttatagcctgttgaaaattcctgcctacaccatctctgaggtcaaaattcaaaggcccctccatcctaatagcattgatgtaacctgtaactaatatgttttacaagcaaaatgcattgcacttgcagatttaggatattcttgaggttgccaaatgaacaagaattaacataagaattggactctacctgcttatttgataagggtcctttctgaggccacctactttgagataattccttctctgcttcctccctcgaaatcatgatatcccttcttaaccccaaatcacaaaggtactaaggaatagaggcagatgtgccattctagtgatttccagctgggaagaatttgctccctgtaggggacatttggcaagrtctgaagactttgaaatctgttggataaaggccaaggatgctgttaaacatcttagcgtgcacagagaagcctcctaccatgaagaattatccagccccaaatgtcaatagtgtagagcttgaggaaccctgagtcactctgacggttctcagtacataaatgagaaccccagataggtataagacctagatgaggaaatggaaaggagaaagagagaagaggaacaaaagaaaaggtagggatggagaacagaaggaggcatttatagatgtagtagggtagaataaagagagaactaggagcaattagaggggtttttttgtagacaccctgggtttccccatttccccagggtgattctttatggggcattaaatggtaggaattataacttgagattttagtgcataccataggattcacctgtagttgcaaaaatagattcaaccaggtgattactttctctaagaattaactcacttaaaaatagtaccagaatggttggaatatttaaaaatagagaaaacattattgaaaagccttttcattcttcagggtggtacagatgtctttcactttcataagaaaaaaaaaaacaacctcttggtcagatcggagtctacattacttgttcctcctctgatgtcctttgttcctacatgcctgctcttctggaggaccagcctatgttgtattccattaaaattgtgtctagttctaggcaaacagcattttcctataaatatttcattcatcccctttctctttattctggctgtccttattcatctctctcctttctctgaaatctcttcctcctccatttgttttctggagtctagaagagtccttcaatagatagagtgggacaaggtttagagagtcttcctgggaattgatttatcttgtgtgagagaggacagtaccagctagaaactttggagaatgccattcctttggactagattaaagctgtcagaaatgggtcaaatgaggaattaaataagacttgcctagggtcaggtctgttgtctcttacgagtgaagacagtactggagttgtcattattgctaatggagaactttctcacacaaagggactcttgaaaatgttagaatattgcttatttctatcttctaccccactgtcttcatcttcgaaatctgggttgaagaatggctatgccatttctgtattcctccactgtaggagtcatgagtggtaaagtaggttcgagatggaggggttttaagatattaaaataaatagtagcaaacctatttggggctgtagttagacagagacacatacatacctatttgtatgcaacattatgttaaaaaaatggatagatggcttgtatgtgggagatgttggggcagacagatgagaattttgaatgggtaatgagagaaatttaaaagtaaggtgattattgattggccattattaaatgaggcagggattcccaagccatagaacttttgttttgtttctgtttatgtcttttctcaattttatgaaagaaaaagaatttcattcacattgaaggcatagttcaacactaggtgaatattgcttaattggaaaacttactagtgtgtgatggggctgctgtgccttcattaaattatgtgtgcatcagctatgagcaattgcatgtaaattaagggtaactttggcatatgcatgccaaatagtggttcagatcattttctcatcaattttatataatttgtgccagttggctttcagaaatatatatatatatgaggaatgtcagttttgtgtttgtgcatgtgcctatatttttagcacaagaaacgtattttccattaatatatatcataagagaagattcacgtatcagggatttttgaaatgagcagtttttgctaatattattcatttaaagagcatgtaattttagaagattattatatttaaaatagaaaggagcatggtatatctaaggttatgtcatttggcctacattacagagcaatgacagttgcattcatctaaatcacaccatttatatgaagaaaagtcacagatccaaaatgggcaagtcaagtatcttatctctttgatgaatcattgatttgatcatgcaatttgagaggactggggagactagaggccctaaattaccattgaaagctttggatatgatggttagaggcacagctcagggaaatatagctgcattcatacaatcctattgcttcagtatctactgtcagatgcttttgaaagacrcatatttttaagattgtgttttttctctctattggaaaataggtcactgtacatttatttaatgtgcagcattcacaaatcaaacacactctgaccatttgtgttcttgtgtagtgatgagaacatcgccaggtccaacctagagcttccatgaagctaaggtctgtcctggaaccaatattcaccccctttccaggagccattagtttttcttacttcctatttccttccaagtctaattcacggtccacattgcactgcttttcacccttctgcagagactagaggatgcccctgaatcaaggaatccttaatgccagggctacccagtctaccagtcttccagaccctctgagaacagagaaggtgtttacctgatgtgagctgtgtggattagtaacgagagttactttaaacactaattagagaaaattcagtaatacctgtctattaacatcactatcactcacttacactccaattattattatttttttgaagtacaagagaaaggtgtatagatagacgtgatgcaggaattatttgtaccctgcgtacggaagaaacccattcatctgtgtggtcatggtaggttaagaatgtgcgagcataaaaagtttatggactatcgcggtaaattgtgaattcctgtctgatattctgcttctctttattcctgctccatttttaacccatacaatatgcatttctctctgatatcaaggtcctcatggtatatctcttgacttwtataagctatgtgtgttctgcaatctgccaggttttataatcttggtttacctcagttttgatattgtacgtaattctagacttctgtttggtttttaactctccacccaatgtagacctttatggtgcgcatttttgttttcctacatttatacaaagttacgcacatagacatacatgaatacatatgtggggattgttgtttaaaaatacaaatgtagctgggcgcagtggctcatgcctgtgatctcagcactttgggaggccatcatgggcagatcgcttgagcccagcagtttgagaccagtctgggtaacatggtgaaaccccgtctgtacaaaaaaacaaccccaaaattagccgggcgctgtagcatgtgcctgtagtcccagctacttgggcagctgaggtgggaggattgtttgagtccaggaggcagaggatgcagtgagctgagattgcaccactgcactcccgcctgggtgacagggtgagaccctgtctcaaaaaaaaataaaaattacactaaaaataaaamtgtgtttacaatttgcatgtgcacactatacatattataccacaatttatttttaacagtaatgtaccatggaaattcatcttgctaataggtgaaactctaattcagtctttaaaaattatcactctattccatggtatatatttaatgctgtttctatggatggcatttttaggttgtgtagtattgttgccaatgtttgcaaaattccaataaactttatggtacttcaaaaataaaatcataacagaaatgaaaaccatgcaacatgctaaaaacatattaagattggctatatttgtgtgaagattataagttacataatgcatacagcaaagttacccaaaatctgtaattggatttttcttcacatggttgtagtctcggttcctgtgtctgggttggggttgcctgccattcccattgattaccatatttctgtggaattcttaggcagcagggaacacagtggtgggaagtgggaagagagcaagactgaagaatgtgtgggggcaggaactctgagctaccaggagcaaactgtctggtaagaaacaggaagcttagtttgacatctgtgtaagatccttgactagagtagaatgagatcttcatagccatttagatcattctaggtttgctttcttcctgcttttgtttgagctgagtctagaaaattctgagctctcaaacttgatctataccaaacctcactcttccttcaaaacctgaaatcataattcctctagaagctgtaaaaccctgtgcataaggtcatgagctctgaagtaaaagaagtctgtactctccaccactgaatagcttggggcttctgggtagtttacttaaattctcaccactgcagttctttattgtggccagctcttacatgcaggagaagaggttcaggaagaatagtggggtggattgcaggagaggtaggtaggagctagattatgcagccttcttaataacaaaacgaaaaaagcctgcacatgcatagaagattatgggttaaaattaagctattattgagactgtagcctaatatttctaaattatctctatggcagtgtccaggtaaccctaaaactaagggagatgactatgtgagacttgaacactccaattgtgaattctgatagtaacatatatggctgagtgaaattttatcaagtataaattattcagtagatgaaataaaaaatggaatagtctaagctttatttaatctatagccaccattaatacagaagtagagccatgtttatgggaaattctcagaagcaaaaaatgagcacaccgtaaaaagaaaaaaaaaggaaaattaccatcaccaaaatgtggttcagtgattttttgacagcttgtccggattagtgtttcttatccttcactgccagacagtggagatgagtcagggcagaagctgtaggtggaagactaagagtaggraggaatgaacgagagccagagtcaagagctacctgttctacttgacatcgtgacagctggcctctatgtaacggggttggatgactcaggattgtatctgctggcacttcttggccgtacgtcagcaccaggactatttgaaaactactgctccagaacaaaggtttttagccccaaatttgagactttgaaaggaaagggctttcttaaatgtgaattgagccttccatttggtttgccaacaatgaatttattctgctgtcttctatttttttttttaattaccaagctctgattcttttggcagctggctcaaaatcctttttccaaaattggtggctgttggcagtagccaggaaataaattgaaatcgtaattaaaatagtcatccattgggaaaagaagttgaaacttggtaaatcagacttacagtaactccaagaattggagccagaaagaagcatgcrgagcacctagactggttccyagtgtagtggccaccctttaacgacatggtccatgcttcgttttttgtgaccttccgtcacatgccttgcatttcattggctttaataaatacacattaaaaaggttgatcacagttgtatcacaggaaaaagaataatgtatagttttgtgacaactgacaaattagcaagtgacacgttaattttggtgaaactaaggaaatagcaagtaggcagttactattgaatggggaagggagacatcagtaaaataaaatgttccgaaatgtatgcttgttggtgatagaagacattcagccttgaagacaatatcctgtatttaagacaattatataacatctaatgttgtgaacagaggcactggattgctgattaagacaagccctataagcaccaaaccaacaaatggcatgatttcagcctttgtttaaagccactctgttttgtgttcactcatacaaatttgtcctatttctttgttttctccaaaactcagaatctgagtgcaaatgtatttatggataaatagtgttgtgttaggggtagcaccatctaaatgatctggtctgaaatgtggcctgtgtcccatgagaccctcatgtgactaagggcagaattgttttaggtaaaataatgtctcagctgcctaacatgagatataattatctctcgcataattatatctgcacataaacatgtttcggcaaatgggttaagcattttatgtgtcattaattcctcaaaagaaccctttatgatagatattattgtagccattttaaaatgaggtattcaaggaactggataagaaactatcctacactctcacagcgagtagcgggtagggcgccaggattgtcgtgcctctcaaagctggtgtgcttcccatcagccttccgccgcctctgggcttgctgcttaattggggctggatcccatacaatctctcgccttgtttttccatctcattcatcagatctgtctcccctacgatattttaacacctcaaggacaggaacattttttggcatctcaattcttagcttgtctgtgataatgatgatcacatcctacaacaatttcagttttgcgaagcagactttctcactatctttttgctctgtttttcaactcaagtgaaatccagcatccaccaccgccacctcaaccaccaccaacttttctgtccctagcctgctcttcacctcctattctgtcttggatctttgagatatattttcagcacccatttatgcttcgtacctggattttcttgtttcttgttttaccgattactggcatattttgtgggtgtattttgcatattgtcaatctgttatgttggaacatcattttaacattgacttcaaaaaaatctccaatttttagtgtcccgatgtaggtgaagcattttcatctgcttagatatgtacatggaatagattcaagggcaattttttttgagacttgatgcttttgtacattttatatatgtagaatttttaaataagtagtttagttgcattatgaatctgcccagatagtaattacagtttttcattggaattcaaatgacttttaacgtaggacctattatgtgagtagctgtttctttaagaactcacttcttcttaaaggaacaaggtggaaagagcttcacaaaagttggaagaggatgcaaatgtatttcagggaagcatttcasagaagttagaactctacttttgcttttctaacaactcccaaaattgmagtttaattgtcaggtcaccaggaaagtatccaattgttaaaatcagattcctgtgcctttaagtaatgatgtattgtttaacttcaattattaataccatacaatggtaaatataaatacattttttccctttgtttataaaaatgaacataagtagaagaacttaaggcactgaaaacaaacacttgggagagactatggatggaaataagcaaaaagttgagtctttccatgtaaaaattgacctagtttcagtctgctcctaggagaatagccacaagctcagagagcttttgttgtttgttgttttggtattacaattaccagtaactttgcattggtgattcctattctcataaggcattttactgatcagaatcttcttattttgttgaattctctgtgacataaatttttgattctttaaattaatagcttttttagcatcttggaaatctcagatcactttgataatctagaaagcagtggtttttctgtccaggaaaatgaacatacacatagacataccaaatctggcatacaattttggagagttcaagaattgttgaacctatttgaggacccattaaagtattttaaagagctttatggcgacccatgtgttttcaccaaacaaaattgtaatgttatctttagacgaaacctctttaagaacattgagttatatcagatgtttctgtagatcaaacatttttgcaatttccatctatggatcaaaatgtagagtaaataagtgaacaaaagcaaactacattaaaaaagtcaggcatgggcataaaactctccagacacacagccacctgcacataaaaagatatataccatctatatttccttaccaacctgtggtagtcatgttgctgaggcagtgcctcaatctagattttactaacctagactaaataacatccaattttctgtaattagaatagcctagagatagtgtgatggatccttaggtttttaaaacaataaatcaagcattcctgtattttttccattgatttttacatacagaaattaggattttttttattgtgtcctctgcagcatattcaacatcaaaatgcagaaagtgtccttgatgttttagcccctttattcatagagaagataatcctgtttctgtttaatctctttatttattagctttcatagttgccactaaatattttgaatcacttccaaatgtcttgatctataattacatttctcacccaactgagagacgtcagtagctttatctgtttttcaaaaatgcattaagtaccttaagttcctttaaaacaagttgtcacacatgtcaaaatataattctcaaaatgttacacataattctcatataaatagttactaagcacatgtcaagattttacttagctcaacaatcaggatgaaaatccagttcaaaaaagaggaaatatatacacgtgtatatataatatatatgtatatataacatataatatatacgtttatatatgtatatgtacatataatatgtatatgtatatatacatataataataatatgtatatatacatataataataatatgtatatatacatataataattatatgtatatatacatataataattatatgtatatatacatataatattatgtatatatacatataatattatatgtatatatacatatattatatatatacatataatatttaatgtatatacatataatattatatgtatatacatataatattatatgtatatacacataaatatacacatacatataatattatatgtatatatacatataatattatgtgtatatatacatataatattatgtgtatatatacatatattatatgtatatatacatatatatgtgtatgtatataatatttatatgtatatacatatatatgtgtatatataatatttatatgtatatacacatatatatgtgtatatatwtttatatgtatatatacacatatawgtgtatatattatatataacataatatatatgtatgtatataacatatatacatatatagtgtgtatataatatatatgtatatatgtctgtatatacatatataatataatgtatatatacacatgtatawaatatataatatatacatgtktatatattatatatacatatatacatatagagagcaagagagagactatatgtaacatatattttttctgtatatattatatagtatctctgtatccatagctatatggatatatttataaatataaatgatatacatattttatatttataaatatagattttggtagcattcctgaatgagaccattttttcctctatcaattatttaattcacagaattcatttagagtaaaactccatacactccaggtttctagtttactaagatgcatccttttgttcggtaactttaggttctttcacatacatcctcagacctatctgaaaggcttgttaaaacacattgctgggttccacccatagtgcttctgtagacctgggatgggccctggaaatttgtgtttctgacaagtttctagctgatgcacactttgagaacaagtgatttaakcccaggctttatttgaggatcaagtagggcagcagggagtgttgattaactcccaggaaagtcagtacaacctctgattgggtccttattacttcttckatgttattcctgttttcttctcctgtcccctctgtacacacaagatcatccacacctgcggcttcagctgccaagtctttattgctgcctgcacagccgcaccccagtgctgctccctacatttgaacatttcaaatccctattaagggccagactcccagtgtcttccccacagagacctggcctccctcgtttgtcccatttctgtcagtgatttcaattccactgcaaaccagggctagaatgctccaaatcacatgttgtaaactagaaggtgctctcctccctccccagttatcactggcaggcttctcttagtagagaaaatgtttaatttttaaaagtttggaatcttaaagagaaaatcctttcagttttcaatctgccagttctctcttctgtttcgtggatgtagccttaattctttataagaaataaaagcttctgagacttcaaggaagtttgggaactgagaattgtagtaagtcagggaagcaagctagtcctggcaatctcttggaagggcagctttggaaggctgggaggtcagaggccaagcttctagaggtcatgtctgaggtgtgtaagtgagacttggagcaggagataataaacataagcttcaggagtttggaagggcaagaaaggagagtttaagaagattatcaaaagatatatcagcttcagtttcagctactcaggaggctgaggctggaggatcacctgagcccaggaaactgaggctatggtgagccatgatcacaccactgcactccagcctggaagacagcctggaagacagcctgtctcaaaaaataaaatataaatgaaataaaaattaaaaaaatagatgtaacaagatcagctgagggtaatttattttggaagagagggaactattgagagcagaagaattaatgagtggattttaataatgctacagaaataaagttcaaaggagaaagaaagatagtccagagtctaaattaagtgattgactttggagagaagagaactatttttatccgaacccagaggaaagaatgatggtagttatgtcaggcagacttgatgttaaataggagaggggaaattgggaggtcatagaaatgagacgcctagaaaatgctcaggtgaatgagcacattgctgtctggatgagtgttggacagagtgattttgtcatgagttaacstggcactacttttcttccttgtctactcctctgtaattaggttcagtggagaaggctgaggttagagatgacctcagtatgcgaggttgattttctttgtttccatgtagatgaacagtccctgtgtatggatggctgctgctttttctcacgtaccgtatgtcccgtgtggccagtagataacgtttgattcattcccattctgtgccagcgccttagacctatgtgtcaatgacagccagctgtcactcattccttggcttcacaaagggaaagaaagaaattcccataaggaagtaaatgtcctaaattagattatttatgtttaatggaataattgaaaatatttaatggaataattaaaaacctcrtgctaattttatgagggagtcattttcaaaagttctatgtgaaagaatttcaaaaaagagcccttctttgtgttcctagagaaaaaaaaatgtgatttgctcttctcaccagtgctttgtgtaggaaaggatggcagaatgctgagtgagggaagcccatcaggttattgaaatgcagccactagagtgtgtgtgtctctttccaggaccatgaaacctccttccccagggctctctcagcacagaggctctctcctcggtggtgcttcctagatggtgagttctgcctttcttgcgggtatcgtgggagttggggaagttgaagagcaaggcatcaattgatagggtgggctctagttttccaaaagattattcagaaagccttcrtgtgactccacatggctggtattggcatgcggaacaatgtgggcctgctgatattgcactgtcctttcctgaagtcatttccctcaacacagcttggttaactctggctgaactcagcatcaagttgctcaggccgatgtttttctttcatcagccctcttttcttaaagcttgactgcctgccttaaattaattcagaccagtagctggattctatatgcataggatggatataatttctatgttatttgcatcttatggaacattcatattatttttatgagaccattattgcagtatgatgtatacatttctggaaaaaggtggaaaaattcagttgcattcaaatctgctcagatccgcatgatatattgcatgcataataggttagttatcttatgattgtttaatgagtccgtttttttatctcaagtatctctctcctagatgctgcctaatactacatttctatccaattacccgtattgcagtaccttctcacctctgtatattcatgcttacatactaccgaatgtatctactacccattctctcttttgttcatatggagacatgattttcattgtagaccccttttttgtttttctgggtgagcatctgagaggatataaatgtgaatatgagtatgacaggatttgtgagtgtatgagcaagcattgggatggcagcagcagagatctattaagatttaaggactgtccagtagcctagcatgactgcaatgtaagggttttaactggcatagtggaagagaaggttataactttggtgccagatcacagaacactttgaatgccatatatatatttttctagtgttatgaagatgggcacttgtatctgtatgagatctaacccacataaatcatgatgtaggtttttgttaatgtctcatcagctgcctctcagaactttcctccagcttctttattccatagcaatgagaaacataatcatttgtcattcctgaatttgcagaggaacaacttgtatttgagaaaattatgaaaatatttatgttgttatgttctatctaaagtcttaaataaaagtacaaatattgtggctgacagtcttagcccaggtagtagttttactccatagttttaataaaataaaacctttaaaaggtaattgcagtcatggtttaaaagaaaaaagtagagtgaatttctccaaggcagattttattctattcttaggttttagacagcaggggtgatgattggctggtttcttagttctgtcgcctttggagagaagctactcattaaatgtttgtgaattttaaataagtgcttgcattttgagtttttctttcttgtgctgtttgttttgtagaaaatctatttataatatttgggctttgttagatagatttaagtgagaagcacataattctttttggtttgcttttttttttttttcttttttgagataggagtctgactctgttgcccaggctgaagtgcagtggcatgatcatggttcaccgcagccttgaactcctgggctcaggcaatcctcctacttcagcctcccaagtagctgggaccacaggggcacaccactatccctagctaattaaaaaaattgtttttgtagagatgaagtcttgctttgttgcccaggctggtctcagactcctggcttcaagcacttctcccacctgagcttcccaaaatgcagctgatagttctttctaatattaggaatatttaaaataatttctagaaacccaaaatttgtaatttagatttttttcgcataccatagatgtagctcaatctctttcagagaatgcttaaataatttttttgctgttttggcttccttcagacatgactctaaggatgcaggttgaaagtgaaatgattcatttaagaccacatatggtctctggcctgaatcttcaagccattttccgaagtgggaagtcacttcactgagaagtctacgtaactgtagctttttctagctttatttacttaataaatacatactaattcctaacttwctttaagatcatttgctaatttcaggaggcataaaagattaaatgaaacagatttttaaagaggcaggtctcttagtctcatggttatctgtgaagatagtctgtataagaagttttaaaaaatgtaaatgtggatggatgcagggtcagcaggttctgtctggtgttgggaggttgggactgagaaaggtttcacagaagcagaagcacttgakctggttctttaaagacaagtatgatttagatggcagaggcaaagggaagggctttccaagccttagaatagcagtggcagaggcatggaagtgctgaggttttcttaatagatttagggactggccaggagactagcatgactgccatgtaggggttttgaccagcatagtcgaagagaaggttataaatttggtgccagrttacagaacattctgaatgccatctgcattttttttcccctagcaacttctgctgatcgcttttatcgaatagacagatctcaggtaagtttttttccagcctgcttgtgaaagtgaaaaattcccaagttaatgtgctttattggtagctaatctcataaatttttctaacgaaaaccactgagacacaaattttggaatggtgttcataacttaagcttgaaccttttatttgtcttcacgtgttttatgatttatggactcaagatgatgtggcttaatcttgcaaatgagtacagaaaataagttgacttgtagacattatcaccagcctgtactccaaattttcattcacaaagatatttttactcctttttagccaaatttcatgtctttttaagctcatttctgtttagcaagtttgaggccccaggtgtataactagactacttagtttcagttcgccaatccctggaggtcagtgatgagaaaaaaaaaatggttttgcccaagttaagaattcctcccattatctgaattctcctaggagaaaaatgtacagtattgaacctaatgataaagttgttaaccatgctgcttagctttgaccagatgacggggtagaagtccacttaycatacactcctgctgggccaattgtatgtgggtgtcacttctctaatagtatttgggaagaagatgaggcaagaccatttctagatatatctaagaaaaagtcctggttaattggaaatcctgaaccaaggggattcatctctccctatctcccactgyctgcgttagcgcagctttggggaggatcaccaactgatcaagcttctgacaacacagtgtgatcctttgacaygttgcagaatttcattattcctcgagaccaagaatacttgttttgttattcttcatgcaacagacttcttgttcttcyttaggaacatttgcactttgtgatggagatttcccaagatgagatttttattctggacccagatatggtggtgtcacagccggcggggacrcctccgggcatgcctgacctggtggtggarcaagcctcggggtgagtgtgcttctcctggcctgtgaggctggcctyagggtgacatccatgtctggttcgcctttgaacttgacatcrttctaatgacatcaaatgattttgaartgtagattttcttgttgtgtttccttagagtggttattataagtctgtcttatgaatggccgtgaagaaacacaaaaccagatttacaccatgtccaagcctctttccccatcacagcaacccttcctaacaaacctagaaagcactagtacttgtgtttgtgcttrtacgtttgtagtaactctgttatctacattaaaaattgacacaggtgatttgacaaattttctcctcttcctcttctttgctatttccaggctgctggagacatgtagattatataataataactatgacataccaagccctttttaagagctctgtcctgtgtctctcttctgtttctaccaccgcttcatagtgacttaatcatcttaagtgctctgtgcttattttctcatctgtaaaatacaaataacaataatcctcactcagagaattgtttggcgattaaaagaattgatacaggtaaagcacttaaagtcattcctggcatttttaaaacatgcattaaacagaatgttattacaataataataatagtcatcaccatcattctagtgaccttgaaaatttggtacaattatccttaattcatagawtaaaaaattgagacctaaagggttatgttacttgyctaatatttcacagaaaataagtagaaaaaatgagatatagtcctgggttacctgatgccagagcccatgcrtttaactaccaccttctaccaccaaaacataattagtatttctaagttatttcaataattaaaaactayttatttagagaattttgtgtgccaggtcctagtgtaagcacttggggaataacagtacaaaaataaaaacagataagaatctttgtccttgtgaaatttagtgttttactggtctatggggcctgaattgttgaagtaagaattgctctagaaaccatacacaatgtgcccaaatagtaaatgcacatcgtgtacacagactcatacagtatgaataaacagtccactaggctagcacaactgcartgtcatcttcattcctgttttccccttgtcacttgatttactttttttcactttttttggttcactgctgctatttgtgggtggtttcccactctgccaggggcagttgatgtccaayatgtaccaagtctaggkggagacaagagaggacacaagtggctgcatggcctgatagcaagctgttctcaggaagccagagctgcgatgtcagagcatgggggaaggccgacaggcacaaggggtaacctgatgcacccctgggagcyccaaaggtggtggggaaggccaacttcgtggggcacatccatgcatcagacccatcagtagtggggaaagcaggtagagtgttttgtcctactgcagaagcagcaggtgctagagtctgggtgtcctcctaccccacctaacctgggctctgactcttgatctagtaaggagaaagtccattctgccaagttgccctggtctttgctcacttggtcattttctttttcttttccttttttttttttttttttttttgagatggagtctcgctctgtcacccaractggagtgcagtggtgcgatcttggctcactgcaagctccgcctcccgggttcatgccattgtcctgcctcagcctcatgggtagctgggactacaggcgcctgccaccacgcctggctaattttttgtatggtcgttttcttcatgtcaaataatggccaaatgctttggccttgctagacctctgttagctctagctccaaaaataaagtagcctgaaaatccaccaggacttgaatcagtgcctttcttatttctcaccagttgcctcccctgaactaaaccaggaacagggaagcagtgaaacaggrtggactttgttattttctaatctgcatttctgccctaggtctattacttcttattcatgtcacatttaaaatgacttaatcttgaaaatcagttttctcatctgtgaaggggacagaatcatacaaatagttcatgattgttgagataaatgaatgaaataataaatgggtagtatctggtaaacacttcataaagatgaattttgcttctcacatttactggcaagattcatcttcagaaagtggaaacgaagtcacgtggctgactttgaatgtttaactgtctgstgcccttctttctctcaggatctcagactggtggaatcctgccctgcggaaacgcatgctgagtgacagtgggctggggatgatagctccctattatgaggactcagatctgaaagatctcagccactcccgcgtgctacagtaagagttctcttgctgttcttttcctctgtgccactgtgattgctgggagaggatgtactgtgggctgtgccccagtggtcaggattctcttttcaatggcgctcaggctgtctcatgcaggtgctactctgtgttttcattccatgcaccttgctcatatttatstaccccaaaccgttcatggaactccaccttccatttcttttgctcctgagccaccttgagccccttgcacgtggacctccacatactttaaacctcaccagtgtcttctttactggagtttagtgtttatcacacgtccctgtttgccacatcataaagacatgcatgagagtgatcatgagtagcttgaaagtgacacgtggtttttcatttgtgaacacattatcttgctgtttcaktggtcctcagtcctgagcctgtgcatgtgtgctgtacccaatattgccacgtgggtttgttggctaaagctgggtgctgcccatgttgtggttgcagtctctgtgggtaagcagtacagcatttrtttgtagatcagaacagtatgtgtgctttcttctgaggtctgatcatggtgagagtgtaggatgcatgctgaagtttcacagcagtgtcsatacctttgtgctcggtgaatccacctccctatcatctcctctggtgacagatacactcatgcgcacctactctttaatttcaggccaatcaatccatctcagaggttatgcaaatccagtgtgttcatgaaattaggctggtttccagtttacctggggtcttaatcaaataatgacaatggccttgtaaccacacagtcttagtcttttgacagaataacaagataactgaagattcttcgaatcctagggttaactaaagaggcaaaggaagtgctttgtttctggagaaagaccagaagcaatttcagtattacaaaggggaaaaaaatgagaaatttggagctaattatttcattggcaaagtttcgaggcacacaccctcagggcagaagacttcattttaattgcttctctgtattacctcttattttcttgtgtgaagacgggaaaggaacaacaatgaattactatggatttttctttttaattaaactgtgttgttagtttctgatggcattttgattgcttataattcaggatgttttccatttcctttttatacagaattgaggcttgtgaatcagggtgagtcagccacccacgaatggctaaaaaagtggccatttatctgttggcagacttattggaaaattagtgttttaattagctacagaaatagaaattaagcctggacaaaccagtatttgtttactgagtaaaaactcagtaaaccaatgagtattttagttgtrtatatatatataatctgtttccacaaagcagaatatgagctcaatctagttttctaggtcctgatttttctatatataacatactgatgtacgtatcataataaataaaataattgtatataagatagtaaatattcttcccaagaatgacaaataaatttaccactttatataatagccaggttcttaaaaccagatgtcaaaatgaactctttctgtctgtttgcgttaaactatctttttagggatgtctcttaatttttggttgatcttcaatttacagctataagtttttgcagtcatttatactactttagttctaaaatgccctagagtagtagacactttttaaaaaaacctgaaaaattactttgaaaacaagcaaagtggcattcaaacattcatccccagcctttcagcttctccagctggatctccagacattgtggaacaaaggcaagtcatctctactaggctcagtctgaattcctgtctcatagaagacacagcataataaaattgttgtgttaaatcacttaaaaataaaactaaactaaaccagatgccttacctcaactttttaattaattctttaacttttaaaattattatgtccatttatttcttagaatatctttttatttccttcagacatcatctctgatacaaataggtataattgcagttgtggaaatatctaataatgttaataataactactattgatggactacttcccacttgctttgtatcataattaaatgatcttcattcaacaatttttaaatttagctgttgcttaacagataagtaaactgaggctcctagagggtaaaatatttatcttaggtcacttcaaatggmaagtgtagtttgacctgaggtcggtttggcttctgactccatgctttttccattgtcctacactatcttcccaaagggaccatacaaagtcagcgtaccagagccacagaagtttactttggtttctatttcttttttacatttgtacagtgaaaagtcctacaatataggggtactatgcatgcacattaaatatacaactgcaaacttacccagaagtaaatatggctgagaattaatttttaagcatttttttctttaaaagaagagattgaaacaaaatataatggtggtaaacttcagtttaaaattgctaaatatatataaactatgttctaatcaaaataagcgtaaaaattatatagaaggccatcatgtaccaaccaccttgatttattatgtcattrtttttctatatttgcattatatctttctttcaagccataaacaacacagagtagtgtaaaaaatattgttttatggttttgttttgtattgtacaagttggagtatctctaattggaaaatctgtaatctgaaatgctccaaaatccaaaacttttaaagtgctgacctgatgctcaaaggaagtgcttattggaacattttggatttcagatatttggatttgggatgctcawctggtaagtataatgcaaatattccaaaatcctaagaaaataaaaaatctgaggcacttctggtcccaagcattttggataagggatactcaacttgtatttttgtttttgcctgtgttatataatgcatatattttggaacttgccatttcactcagcattgtgtttttgaaattcattcatattgatatatgtgggtttttaataatttttgatatagaatattgcatcatacatatgctataaattgtttctctatttckatagtgatttctaatattctattattttttaaaatgcagcaaacatcctgtgcccttctgtgttgcagaatatatatgcagtttcagcttactcgataatgcaaaatttaccttcccagttagagtactgatgaatcagtaactgaaaaggccctgaacacttattgtaataatctaggtatgatcagcatctgttgctttacactttaaagccccagtcaacttgggggataggaaaggttcaatttagcatcctgttgacagtgctaaataactcactatataaacagaaatcaaaagagaaactttcaattcttagaactgaaaatactacttatcagagttttcgagacactgctaacgtagtattcatagtacgttaggactgcagattcatttatcaagggaaaaatgattgtgtgcaaataagcaaagcattcaatttgataaattggaaaaagaatcccagtgtaaagaaatgagaggggagaaaaatgataaagataatgagagaaatcaatgacaaggagaataaaacagacagatgatgaacagaaaataaaatttttggccgggctcagtggctcacgcctgtaatcctagcactttgggaggctgaggcgggtggatcacgaggtcaggagatcaagaccatcctggctaacatggtgaaaccccgtctctactgaaawtacaaaaaattagccgggcgtggtggcgggcgcccgtagtcccagctactcgggaggctgaggcaggagaatggcgtgaacccgggaggcggagcttgcagtgagccaagaccgtgccactgcactccagcctgggcaacagcgagactccatctcaaaaaaaaaaaaaaaaaaaaaatttaaaaaattcgttgaaaagataaataaaacaaaattctgagaagtctgatttaaaagaaaaaagtactgaaaacagaaagaaatatacctgcaaggctttccccatatcattcttcctccaaggcacccagggcatttttgtgccaagcggccctttctcctccaaattgcaactgacccggctctgttggatcttctcagcattttcccatggttttaaaatttaaaatagtcccttagatccatcaacctccctttttctcaggcagagtgagaggcaattagtataaaaaggatgaattagatttctatcattactggaattggttgcatttattttaaatgtttccatttagaagcattataattttaaagaaagatatacacatacctacttatatgcagatcctataggaaagactgtaattccaaagtaggatacgcaatgtgtatagtgtctgcaaaacctgtgaacataataacaaatatttaagaaccaattttgaaatgaattggtgagaagtggttgactgacattattactgctgggaccataatgattttttctttaagttaaaaaaattttttttcagtgtccaaggaagttctatttaaaatgacatgattctggaaatgtatttgctcttatcattaattgtaccaccacgattagtgacaagactatatttcatttggcagaagattaataragagggaatttacttaaattttagcagaccaaatctattygagttgtaaggaagaattttgccacttgaggatctatgagaaaagaaaataggcatggaatgaaaactctgatatattcttcttaagttttctttgagaaaaggactgactcacctctgagtcaggtgggttaagagcaggcaggtaaagggtctaggagacactgcttttgtttctgaatcagagtaacctttttccggttcttagattttgtagttcgtaagaaacccccaaatgactgaaagagttgtactttttctcaatgtccccaagtcctagtcctgaaagaactaaaatggactgtcacacaaataatatcttgccactagactaagacacaggggaaacagtgtagtgaaccacaccgagggtagatattcaatccagataattgtgtctaggcaggtatctggtacccgatcagctgcacaaggctaatgggtttttatgattggcagaggatttctgtcttcaaggaaagataatgctatcaaatgtttaactataatgtgtgaggtctgatttgtgatttcattgtgattaccctaagaaatagggtaaacaattcagtcaatcgtgtattgaacaaatcartattgggcaccttcagtgactgaagtcagkcactgaagatatacaactaaagaagaaataattattgcccttgaagagcttatatttaaaggggaaatattaaaccaattattaaagttccttctaataagtgctattatggatatatgcatagagtgttctggaaacaagaggaaatataatttgctgcttttttttttagatttaacttttttgaccctagaaatgatgaatatttaaagaattaacgaaaatgtcagcctcaaagaaaaaaaataggcttattaagtgttctatgtgtattttcttcattttttacatgtgaacagataagtatttgtccttcctcattgtgtaaaccagaaatatctctcaaataatggaaaacattcaatggtagttcaacctctccatatgctatgtgtgctcaaggaaatttggacaaccgagaaattatttggagataccaagatacctaataatactttaaactgaaaaactggcctttttagtatagtctgcaattgcaattctgaatcactatatcgagaagataaagcccggagacctcctgtgttctgaaaactcagatgttctaagctgattatgggagaaacaacatcattcccctctggtcctcaactattttctttattcagtttcttctgggaacattaggttatggcctgaacctaataaaaagggtaattgtgcttattgtgaaagtttcaggttctcaacaggaagacagactgttggacagcgattttgattttggaaatattctttcagcttcacaatcwgataagcgggagaaaattaatcttcttagtgggatgcaggttttgctgaaatatatcttagagatgaaatcagtgctgtcaggataaagatggctcctggcatctgtttcactgagatagttgggtcccgtttctacctacctttgacatccctgcttacctttgactgggctcaatcttgctcaccccggatactcattccagctggaaaaatacaggatagctgacatatgtcttccttcttctttttcttcttgacttaccttgagtttgaaatgacttggtgaattactctatttggcaagcacataataacactctattcctatgggtgtgtgaaatatttaataagagatttgcctttgttatttttagaattgttcctcaatcagttatgcatatggaggccctaaaccactcggaggaaatggatttaaatttacctttccaagttcagttagtggaagagttagaacagagttccctgtgtaccagatcttattttgactgacattgaaagaaaaacaaacaaacttactttaatgttaaacatccattttatttgaaataatcccaggaaattctcgcccttcattgccatgagttccaagttttgccaatgattagagtatgaggaaatattagtgttaagtggctctctttttacatttgtaaaagctggcagccatatttattcacacttcaggaatactgtgaatgtgaggcagtattgattggatccctctttaaagcatgtgagttccttggatgaccaaactgtgcatttctccctctgtctccatagcactttgcaccatacctaraatggtaggcatccaacaaggcaggcttttgggatgaatagaaggatgttccattcatagaacatcccttgatagaaaaggtgctttgtcaaaccaaaataaatacgtgtctatttatattgctatactaaacccagtacttatcaaattataacaaaataatagtgataacaaaataatatgtaaaatgttgaccatttttgttaggctgtgggttccatttatatatttcaaatttgaatataagtatgctggatccagggaattcacagatcaaaataataaagacacacctgaatgcctgacttggagaaatgttggtatttcacaagcgagaaagtaaaaggtaagtatggtcggtataggaagttgtaggcactgttggtgagcacagtggtaggtagagtggcaaggaagaattgtttcccaggcattcacctccaaaataaactgttggtccccggctgcattctccaacttccaccaacactcttgttttctcagtgtrtctgtcttaggtgaataatttgattaaacagatctaaagtgtgaaagagtgatcattttgaaatattttcaaaaaaattcgcttgcaaatctcaagttgctgggatgtggagcagtaatcacttaccatgttcagtgtggagttgaggaatgtgagagggatgtcatattatcactggaaatggtggtggctggggagtyatatcgggcatgggacttctytgcggtacttctggggycctctgaaccccctactctaagaagatcagaacaagagatatctccacaccatgctagcactacttatttggaattcagggagatggagaccacattccccgccccccccccttttttttttaacttttctggatgattgtgccaggcatcacacataagaacaacaatcctccaacagttttctccaatactctgtgagatgctggtcttactccatgactcccttacaagctccttaaaggtgggaatggaatgttttaagttaagtacctcccacagctcttggaatagagttaagtacatagcagttcttaatatctaacactggagtcactgaattattctcacagtctgtcgagcccattttaatttcttgttttcaatattactatgatttatctgcattcattatattttttttcacagagctcctcgaactgatctataactgagaaactctcttgtccttagacacattagagtcaggaggaagcagacaatgtttagattctgttcccaccctctcctgagaagggtggggtgggaggagatgttgtcagaaagctgctggggtatgttacagttatcttcagaggtgccaaaccagcttccaaccccgcctagttttgtctcccattttctaaaactgggatcagaagtccttatttggatttcctaaaaataagtagctgtggctgagcccttactcaattaccacagggagatattgcatatccgggatcacgagataagtgaggtgccttgcttataagccccacgtgctaagactaaacgtggctctcatgtgacttgccttcacaatccagagctccctcatgtttcaacttatgcttaaaaagaaaaaaaagaagtccacatttacaaaatccagatggattatgtctcaacagaagctgttggccggggttcccagagtcactaggataaagctggcagcttggcttttyctaaagggtccttcctcctggctctccgggtatgtctccgttgtctggattttagaataatgtgccttttctatttcttcacccttttttttagaaagtgggctggcaactatattgcagagactgatttctaaaggcaagccacccatcctttattgcttcacaactgtgctgggtttaattatttcttttttcattttgtctacagaatgctaaaatgtgatggctacatcgtcaggataaataagcttgtgaagtattattttctccaacttcatctctttattttatctatttcttttctgtgtccactgtcgcccattcttcctcaatctctcacatttcaaactgctttgccctcattttgttgcagttcttaaaagttaacagtaggtggcagtaaaattttatactcgaaagacattcaggcgactcagcaaactgaggagggtatacagaaagtatggaattgtaaatgctaaaggtaaaacagcgtttttttaaaattagtttttagactttttaattgactaattgcatatatttattgtgtacaacatgattttttgaagtacgtatacattgttgaatggctaaacctggctgatcaatgaatgcattacatcacacagttatttttgtggtgaggacacttaatatgcactctctgtgcattttttaagaatatattatatcatcattaaccaaagtcaccatgttgtacaatggatctcttgaacttagtctgctgaactgtaattatacgtcctttgaccaatatctccccaacctsaacagtgctattttctaaaagccaaatatatctaaatataggaatctatttaaaaaaaaaaaaaacaagatatttcaagcccagctcacatgggggtcatcaaggcatatatttgggtaggtgagtcttaaagactgggaaattatgataataaagggaattggtagaaatttgtatcaaatgaggaactcaccaagcagcctttattatttacatgctggaaatgatttccttccctccacacaaatgctcatctctgtcttcttcctttcattttgctctttctgcaccccttccctctgttggtcatgaatgttacctttgaggctgcttggcattccctgaatgggtttgtgaccacttgaatagagaatgtgtttgtctttctctcatttcaatgccactctgtgtgtttgctgtaactttcatctctcactctcattctcgcctgctctcttttactgtatgtgctttgttcactgttttaagagaaatattcacaattagaaggaccaaaagcaaacaaagagaggattatgtagtcgatggagatttgcagtgctgtgggatttctggtcctattttacctaattagagatgctttggggctagagtgataatggtgaagatgtcacacagatccatggtctcattctttctcccttgggtcctccaaatgatgtcataggcctggcaaactagttctccaggataggcaatgcacccttgagagatgctcaagggaagaaagctattgcacagagatgataatctgcagccatgctttcacagcacagtaaatcatacctttgctcacttgatttgaatgaagattcttgtctaccaacagttttaggaaatagatggaatttgtgtagcatcaccacttcacggtaaaacagaagaaaaagatgaggtttctgcagttgtgatgcagaccgttgaaatgtgcctggagagaatgcccaactgggaaatcggttttcattcgggactacgtaggagtgtaacagaggacaagcatcatggctcaagaagcagggaggaaagtggaacctggggaatgctgaccaggcatgaacattcttacatgttcaccataggaaaaaggtgtgagcacatgatgggaggctgttctatccaggaaagactggattccacccaactgtgacaaaggtaaatgagaaagtccaggaaactctcagggctgtggtcaggagagggraaaagaaatacaagtaaatgactgaaacgacagagaaagaacattcagagctgacattaagagcttctctttcccttcctaagtaggatggatcatcacctgatgtttatagaaagtggtctttttgctgtggttctcatccccaaagctagacagtaaagaggaaagacaggcatgaaagggaaattgaataaaatacgcatatagtgagttgttttcagtgtgtggacatacgtgtgctgctttgttccccaacaagaacttcacaataaggagtggtgtacttatttgtagtgtgctgtgtagggtgtagaaggagcacggtgtctagcttgcccagcattcccgctttgtttccttttcttattgcaggatggtagccagaaaatgaaggggccttggctatttcagtcaggcccgtgaattggatgagtgtctcccacctcttctactcsatccatagtctgtggtcctggggaatcccactgctgagtgttttcagaatatgaatctatgctcttgtgcctatttaaactctgctgtcacacctgtcctgcatgtttatcttaagcccatctctatgtggtggccccatcccttggccaactccccaccaggtgatggtttagcagtgctgagtagaaggtatatgtgttggggacacggaatagagatagacattcatttgtagatgtttctttacagaaagtaagagtcccatatagaggcatccccaatatttatctaatctatcctctgttctttaggaaagactaatggataatctattgacatcctatctccaaagaaggaaatgatgtagccattctgaggaagggccaagtaggaaggccatgggtgcttttaaattaaagccatgagatgatgaaaaaaaataaataaagcaaaatatgcatagagtctaaaaaaataaaaagaaagaaaactggacagtgttattgaaatgaaaaggatattgtattaggatcagcttgtaagttttgatcatttcatggagcttaccaagaaaatgcacatatctaaaacctattgtaaagtatattataccagatataaagactgaaatagtcrtgacacccattatttcatttccaggtttattgactaaaaacgataaaacatcataagaggtgcaatactttataaagtcctttgccttcccaaatataatactcatttgcttttatgtattgctcttttgctggtagaaaactgggcacatttttcagtgcccttaagccttgtaatcgatctactagaaagataaaaggctttgaaggaaaatttgtggattgaaggcaatctaaaaaaagtatctttgagtttcttagagatgcttgagtttagatagagtgctgtctgtaatgcagcagccactagccaatatgtgctgaatgtcttgttccctgatttgtgatatctctatatattaatctaataaaatgattcattccaagatattatagctgtgtttagttgggtaatttcatatattcagactgccatgacaacactccgttccagaggaacaaacttacttcttgggaacctggagacttgtctgaagctgactgcctcaaacacagatatctgttttgtcctgttttattttttgtttgtttgtttgttttcgaagtttgtgactttaaaaattcaagggacttttgcttttggatacataatatgactgtgctggtttcagtatgaaaatattttaatttttaccagttaaattacataatattctatctaaaatagcattttgttttccaagagcttccctttttttccaagtttctctgtgtatgctagtttgaaaagttgtctttattttagagacaatatggatattctcataagcagggttaatattgggaagggtactttcaccagcaaatattcagatcaagattcatggaagagtaaatccaaagtaaaatatatatatatgtgtatatataaagatatgtatataattaaaaatatgtaactatatattattttaattttttattttttcgagacagagtttcgctcttgttgtccaggcaggagtgcaacggtgcaatcttggctcactgcaacctctgcctcctgggttcaactgattctcctgccttagcctcccaagtagctgggattataggcgcgtgccaccacgcttggctaatttttgtatttttttaagtagagacagggtttcaccatgttggccaggctggtgtcaaactcctgatctcaggtgatctgcccgccttggcctcccaaagtgctgggattacaggggtgagccaccatgcccagctattattctagttctttaaaaataattttaaaattgacataaaattattatgtgttgtatacaacatgatgtgaaatatatataaccattaattatgtagctaattaacgtatgcattaccatgcatagttataaattttattgtgagagcacttagcatctactctcttagcattttttaagaatgcagtgtatcatccttaactatagtcagcatgctataccataaatctcctgaactattcttcctatctaactgtaactttgtctactttgaagagcatgtctcccatctccctcaccccgaaatgccccagcctctggtaacctccattctactctctacttctgtgaaatcaacattttagattccacatgagtgagacatgcagtatttgtctttctctacctggcttatttagcttaacataatatccttcaggttcattgatgttgttgcaaatgacaggatttccttttttttatggctgactagtatttcattgtgtatatataccacattttctttatccatttgtacgttgatggacacttaggttgattccatatcttggctattggtaattgtgctgtaataaatgtgggaatgcagctatcttttcagcatgctggtttcacattcttttaatacttacttttaatatttaccttatgattgctgaatcatatggtagttctatttttgttttgttttttgaggaaacttcatattatgtaggttgtttctttgctctggtgattgtttcctttgctgtgtagaagcttttgaatttgaggtaatcgcatttctctattttcgcttttgttgcctgtacttttgaggtcatgtccaaaataatcattgcccagaccgatgtcgtggagcttttctgttttcttctagcagtttcatgtttggggacttacatttaagtctttaatccactttgagttgatttttgcacatggtgtgcagtaagagtctaattatattcttctgcatttagatatatgcttttcccaacactatttattgaaaagactgtcctttccttattatgtattcttggagcttttgctgaaaatcagttggctataaacatgtagatttattttccggctctctatcctgttccattgttctatttgtctgtttttatgccagtgtcatgctgatttggttactgtagctttgtcaaatattttgaggttaggtagtgtgatggctccagctttgttcttttgctctagattgctttggctattcagggtcttctgtggtttcatacacgttttaggattgtttctactaatctgtgaagaatgtctttggtatttttataggaattacgtagaatctctaggttgcttaaaatacgaacattttagcaatattaattattttaattcatgagaaagagatgtctttccatttatttgtatctttttcaatttctttcatcaatgtttcatatcttaatagatttttaattattatttatcttctcttaatcttttttcctagtgcggtggtaccacagtggaaaaagccacaagtttctttaataacaactagttcaaagactctgggcagacttttgctctttttgcctccctgtaactatttcttgatcatttttcttctttaagtttacatttcacaaatgctgtatttacccctacctcccttccttccctccctcccttcctccctcccttcctccttcccttcctccctcccttccttccctccctcctccttcccttcctccctcccttccttccctccctcctccttcccttcctccctcccttccttccctccctcctccttcccttcctccctcccttccttccctccctcctccttctctccctcccttcttcccttccccttccctccctccctcactccttccctccctccctctctccttccctccttccttccctccatttctaaattacacgaagatttattaatcatttttatctgctttatgccatcatctttttagtgtgttctttgcctgtgttttgtgttctcctctggtatttttgcatagatgtcatgctggttcttttctgttattacttgtaatatttgcattgggtgagtttttttttttttttttttgagcttctagtttgggatggatggtcggtcttagtgatttggtgtgctgctcttaagtttgactttgtctctgttatcttcaaacttttgcttatcagcatcctcttctaggtttgggtctacttctggctagcagaacaccctggctcaaagtggaaggctttctgccatagattttgttgtgtatgaaatagtttatatctctttagctgactaaaatcaaaattatctgtttccctaaaacttagctctatttttactgtacttggtagctcttcttcatgtatgatggtttgggcttataaatacctagtttaatcaaagagggtatttcctttaccatttctcatcctccctgtcattttccatgggtttcaaaaaaattgaagggcagaggaattttttttctgtgttactaacatggaagtttttcagtcatagtctttaacttgasctctgccttttaatttgtcttcttgttattttatggttcactctccactgcctgctcattgcagaatgtgtgacttctctgcctcacaagcttgctccatttagcttagaaggtaaattgcaagtacttcaccggggccccacacgccatgtatgaaatggcccttgccacttatttctcaagtccttgcttttgttactcctttacattctagcaatactgagttacttgtatatctggtaggattctatgcaatttcatatctgtactccttttcacacgcctattgctattctgcctggagttcttctccttcctaacttacctaataagctcctctttattcttcraagccaagttcagatgattcttgtttttctaagccttctttcacacttttcatactgaatcaatctccctgttctctgtgctacctctttgcctcatatatattttgatcattatatattttttacattataatcatttatttacatatttktctttttcactagattatgagttccctgaaattgttctttgtgtttccttcccttggcacatggcctggtaataatagggtctcaagtaataaattgaatcaacataaatggagagagtcaaacctgaataataatgatttaggcttagtaggagaaatatttttaaatgcatggcttgaatttttgttttgtattattttgctgcatttaagcaaaataaaatgtaaaaagtaccaaaataaataaaaacaaagcacaaacaaatatgaatattctgtagctaaaggactcatgatcaggaaagaagtgaagaggacagctataagaatgctagtaatagtttacactataagggcagatgcttgctccaagataaagtatacatggaggaaaaataaacagtctgggatacaaccacatgtctttcaggtgtggtgaaaagaataaccagagggctttcctgcatgcctcagttgtcaggtttaagataattatctstttytgggattgaacctctgttgttaaaataactacttatattgctgatttcagaatatttcttctctcctgagctaacttctttcccctccctctctctctttctttctttcttttttgagacagagttttactcttgtcacccaggctggagtgcartggcgcggtctcggctcactgcaacctctgcctcccaggttcaagtgattctcctgactcagtcccctgagtagctgggattacaggcacccaccaccatgcccagctactttttgtattttcagtagagacggggtttcaccatgttggccaggctggtttcaaaatcctgacctcaggtgatccacacatgagctaactttttatgccgatttccagcaataatggatgatgtgcatgtctcagtagtgcagtgcagtaacttgttgcagtgaaaggtgaaatactgagtgaggatggaaatactccatatgtcttaaaattccacaaagccaggcatatgggagacattcaacatggaaactcaacatgactaattttcacaaaacactctgaaattgatattttatccactgcctggacatactgcagaatgcgtccccttgggactctaacggagccatctggaatttttcagatttaatatcagggctttgcttttgcacaaagccagcaaagaccttgcttcacaagctctccacttgagacatttagttgtcctttggcatgaattttactttgttcctgtagctctgtgacaaattaattgcaaacaatccaagacacgttttcacttacttctcatcagcaaacaccaggaggaaagatatttccttgtggctgattctagtatgacctaagcacctgaagaaattagctcatcttacttaaaatataggttctcttttagattcagcttctaatttcatttcacctctcattcaatactcccctccccaactttatttttaataataatggaggcagaatatgggtgcctgtgtttctgggtgcttttgatgtcctttggctctgagagtgtccacattataaccaattggagcttcaggcactttcaagtctctaggacttttccttgcagctggcctaggagcaggcaagcttgtcttaaggatggttttacagtaacatgatgactttttgggaagctccagaatgtgtcagtctgaatatcagtgtgatggaactgagattaattcaattcaacacattttaattaagggctcatctgttctaaataagatacagccttagttttcaagggggttacaacccagtgagaaaggctggtatgtggatgataaaaaataagggaatccagtgggaggataaatcaacyctacccagggaggccaaatggtgcttctcaggcartgttgactagggattgtggcaggtttccgctcaccacccccatgtccatctcccagaagccaattttctttccaccaaatcttgggactctgtagttttcatgaaaaagtctactttaagagatttgcacagttgaaataaattgatactttgccactcattgaggttcaaggccttttctcctttaccactgtgtctttattctttactgttcactcacataataaacagtaatcttactaaccagtagataaagtcatatcaagcatcccaaagtagctaaaaattattttcaaccatttttgtattgactgaatgattcttgtcctgaggtttatcttcatgtctcataaatattagttayagtaattggcagctctattgccaaactcctgagtttatctttggccatttccctgctatggatttgagtgagccaatcattcagagaagaggactccttcaaaataggggaagtatgtgatgtcttgtctttcccttcraaatttcaacaactctgaatataatgttatatgtctctctctttctcctcagaaaagaataagtgtgagtcaaagccgtagtcttcaagctggaggtgaattcatctccaaacttaggtctatactactcaaagtatttcaactagtagtcaactggggggaagcaagccttttagggttgatatgatttttcatttgagatctgattaycataattaaagcagaactcacatatagtttgcaaaagttgttgataaagttctgaggaacctcagtgattgccttctggcctcatgctgtttctcccgggttctgagacataatgcagcgaatagagggtcagctcactcaaacattaaattccatgaagagtgaaaacaaaaactggtaatgataagggtgcatgctatttcttttacctctgtctcaatttatactgttcaagtagatctctttgtatctacagacacccaatctaatgctttttttatatccctggctggagccatgtccttgggcaatacacatcacaggatttcatctatactacatttctatgagttctctttttttgtgtggtaaatctagacttagctaagtttgttgcagtcctaggacaccatgcatagactgatattttagtaacctgtaacatccaaccaatccaggtaagagttgggaattgttgattgaaatataccatgcaatcaacacattaattacactgtctactatattgactttccatttaattcaatttgagggtaaaattactatgaaattattcttgattatcattataattatcatataaaatattgatcatgcttattatttccttttaggtcaccagtctcttcagargatcatggtaagaatcatctgtcttatttataccaattcaggattgaaacttgacccctggtctttgcagttcattgtcagagcaaataattgtttaagcaaatgtctctaagatattggctttgtggtttttgaatgtgaaatgtcaaacacttttaaaaacttaaatcaccctagctgaatttgatatctttcaaatctgttccaacccgtctggttgacgaatattgtgaagccttaatttattctgcctgatttcagtcccatcagcagaaactttttgtggttttgtggttttggrctagtcctgtgctttttatgactcagatttttawccttaaaatgataaaaatttttrtggtagtttgtggtagatattccctacagtcccttccagaatggacattgggatcatgttccaatcactcatttgtgaagarcactctaaatctgaaaggaaggcaagcagtcagtggtatttgttgttacccagttgagatgaattgtttgcattttaagagacagctaattcactcaaaagagaaaatatctcattttgttccatctcacctttggagttgttcatttatccaatcagtcacaaaagtgttaagtgtctacartgatcagttatgctatgtagttatgttttacaaatatgctatatggaactttggtttggggcccctttgtatcttacttggactttggaaattctctcataattggtatccatacctctatatttcttttccctagtacactgtataccgggctagcaccaaaatgatcgttccatagtaaaaatctgctccgatggcctctagaatgaaatctttccagccgaccaataattgtgttcagcttttcaatattgtattttagcatggactagtaagcactaaatgatggaatctttgtcttcctccactgcttattgcttcatttaccatcttttcccttctcctacccatgatctgttttccagccatgtgacaatacatctaattctacatcaaatttctggagctcaccatcttttctgccatctccctgcttttctccatactgttctctctgacaggatgctacttcttttgccatatagatggtttctatgcacctcacctcatcctctgtaagggcttgctgatctgcttatcgttgtgcctaatatttttctacattctagggcttaatgcrcaaatttcatgctttatttacctgttttccctattagactatgagttctttgatatagtttccaacgaagagcaaacaaggaaaaagtgtttattaaatgaatgaattaagaaaagggagaaggagttttaggctggcctcttctactgccacattgtgaaatctgacttagtactggaatgaagttgtgttattctctatgaagaatcatagggaaaattatgttcaggcccattaagtcaggatcaggcaattgaccacctaatggtaacctgctattatgtgctattttgctgattgctgttggtattactaggtgtttgcccatttatataggcccttgggcttccatgttcacattataaactagaagcttgtgtttggtttttattttgaactaggattccctttaatgacttttggttgtctttgccttcctgtctatgagaatttattcctcattcagacaaaaatggtgggtgagggaaacttgtgaattataatttgataatccactaggacttcttaagtggttatgaaataatagggggcatatgtcagggtcctttgaagtcctaaagggtgactactgmcagaaagacttgcttggaagattaagagcacttcagaattgattattttaagaaccttatatgtgattagttgaagaaacattattgaaattagagggccattataatttcatggcttcaaaaaatttcttacatgttcatacctyttagtttgtttctgtgacttccaaaaatagttcaagtacataatgcaaaattatagtgatgatttacctaatcytatgtaattgttcatcattttctagcccatatattcttgaaaaaaagcttttttctttattaccagaattttctatccaccactcaaaatatatttccttctttttatacatttttaagagctcatgtgtactatggctagtataaaacctcttgaatgttatagcatcaatcttacatattatttgtacacaataatggcattgcaacacacttgtaggagaggtgagaagtagcaatttgtctttctcaaatttattggtagaaaatttaaggcatgttggacacatggattgtgaaattggaatataaaaccttacgtctcttgattttctattttgtttgctttcctcaaatagtcctccctctgtaataactagtcactttggctctaagacaagaacttattcttggaaaaatctaattttgcaacgtccaataaccctggtatttttcattcccatggtactcttgcatagagagcttaaatacagtggctttgtcctttaccttatcttgtttgttttcttttccttgtctgtaaaatggagctaatcataaactgcgtacctcatgggattgtagcaagttcaattgagaaatcatttgtgaaatcactttctgatttttttttttttttttttttttgagacggagtctcactctgtcgcccaggctggagtgcartggcacgatctcggctcactgcaagctctgcttcccgggttcacaccattctcctgcctcagcctcccaagtagctgggactacaggcggccgccaccatgcccggctaattttttgtattttttagtagagacggggtttcaccgtgttagccaggatggtctcgatctcctgacctctcgattcgcccacctcggcctcccaaagtactgggattacaggcatgagccaccgtgcccggcccactttctgatttgttaaaagcaccccaaacatagtattattcgctagcatccaggcagtagaagaggaagcacaagtttatctgtgatgtttgctcgggattatgttccgcccttgaaaagtttaaagaggacgggagagaataaccgtttttttcattatcattaaattttctctggaaaccttttattacatcagggtgaggaggagtaaaatgtttaatacaccatttagcttatagtgccagagtaaaggctcagttgatgattagatgtgtggtcatatagaattggcaacacaaggtctaaatgacacataaactgtttctatatttatataatagcgcatcagggtcactaagaataaaggctaaattgtattgagtgcttattatgcagaagcactgtgctcgcatgctccaactgccttatgtcctttcatctttcacaaataacactctgtagtcaatgtatcacccccagtttcacagctgcaaaagcaggctcagagtgcttaaataacttgcttaaggtcacatagctagtaggtgagagagttaattttcagacccaattctaacaatcaaactcttaactctcttttatcggccatgtccctggaaaaccaaagacatgattgaatggatagaactatggagataattcttccctcctctaacaagartatatttactactgtgtaagttaatttctttttaatgacaaaacagagcagaacaaaaataacaacttctccctcctrytggtaatgatttgtccctgtagaaaaaggaaataccaatgtcacattttctcataattagttaactgagtgaaactgaagtttcagggaaacctgccatgctaaaccccagtggaaacattaagttttaatgttacatctggaaactggagccctactccttgttagaagataagcttggcagtgattgattgcactgtcctctgcrtktcctctgtattgaatgcctatcacttcgtcatttaaattgctcctggagccatctcctgggcccaggctgcttccctggctctgagaactcatcttcctttctgtcaccttagcctgcttattttacaggctccttggaatgctgcgcttaccgctgcttcacttactgctgctacctgtgccagcacactcagggcaggtcatcttccaactaatgtctgttcatttacaaaataaaaggcattagtggcttctcaaagaaagtgccagcaatctgctgcatgccccactggaacatctgaggcaggcatccctctcctgtcctacctcttagacctgttgtcaactatggccgtcacattctagggcagcttttttgttgcagcagtaacatagtggacatgaattgcagtaatggctatttggaaataaaattgtcacaaccacaatcactagtgtaaagtgttcaataatgaatccactgtcaggcttggagacggctgtacttggcagtaggttactgatatggtttggctgtgtccccacctaaatctcaccttgaattgtaataatccccatgtgtcaaggatggggccaggtagagataattgaatcatggagcagtttcccccatactgttttcgtgatagtgaataagtctcatgagatctgatggttttgtaaatgggagttcccctgcacaagctctctcttgcctgccaccatgtaagacatccctttgttcttccttcgtcttccgccatgattgtgaggcctccccagccatatggaactgtgagtccattaaacctctttcctttataaattatgcagtcttgagtatgtctttattagcaacatgagaatggattaatacagttatgcagtgaaacacactgtggcgtggcccaaactctttgaggcatcaatggctgtacctcatcaattcacttttctttcatgtatattactgaaatagatactattcataaaatatataaaatgttatctgctcagtttaaataataagcaaaacgaactactgtgtacttggccctcagactaagaagtaaaacatttgtaggaatttgggagcttcatgtcatttgcttccctaattatgtccccttccctctccttcagaaataactactattctgcctttttgttaatcatgtccttgtttcttcttgttttactacatatatgcatatcttacatatgaatggatacgtggatatataactcatatatgtattcctatatgtgtgtatatgtgtgtgtgtacatagttttatgtattttgaatttgtacaaattgaatcatgttgttatttgtttcttttgttcaaaagaataatttttgtgattcatccttatggatgagtgccatatgcatttcatcaatagttcatgttgtatactactctattgtatgagtatataccaatttatatatccaatctgctaatgaatatttacataaataacaggtttcttgggggtttgtttttgttttgctcttgcaaacaatattactatgaacattctcttttttgtaactcttcctcgtatccatgcgcttaaacctgggaatagcttaagttaggtggtagattatacacatatttaacttatagcattataacatgttgttttccagagtgatcattttaatatacactcccaacttcagtggataagagttcccattgatctacatcctcaccaacacttgatattaactaatttaaaaatgtttgctagtcttgtgaaagtatgaaatggcatctcaatgtgattttaatttgtagtcaatgattacacatgagatcaaacatcttttcatatacttatgggccatttgtgtttactcttctatgaaaggtctttttatttcttttactcacttttccccacctggttggttgtgttcttcttaatgatttatgaactttttaatgtattctatgtaaaaattattttgtttcctatgtgtgttgcaaattttctccagtttgtggcttatctgttcgagctctttttgatgtcatctgatgaatagatggatattctttattttactgcagtaaaatcattaatgttttctctatggtttatgcctttggtattttttaaagaaatctttcaaagcataatcataaagatattgtcttgtaaaatttttagaatgctttctttaatatttgataacttggaattgatttttgtggtttggtaagagataaaggtcaaatttaattttgattctgttcatatacataactagctatttcattttcattcattttcttcactgacttacaaagtctgtcgtctccctgtaaatgtgagtctctaggttctattttctgttatattgatgaatatatctatccctgtgctattgttttagttgttataactttggtatgagtccagatatctgttggaggatatatcctgtaatttgtcctttgggagtgacttggttataattgagttttkcctgtttcatataaattataaaattagcgtatcaaattttgtggtgaaattttttatgaaaattgcatgaatctataaatttgtataaagaaaattgatatttctatgataatgcatcattctattccaagccacatctcttgacatttaattggctttttcaaatggctatgaatagagttttataatttccttcatgaaggatttggtcatttttgtgttaaatatattcctaggtactttatatttttagtgacaatttgtatgttgtatttttaaaattatgttttctaagtagtctttgctggcatattgaaatgcagttgaattttaaaatcttgtttctttatcaatattcctgctaaagttttaaattcataaatcttatctgaagcgtctttttgtgggaagagaattctatataggcaatctcatctacaaagaattttgtttygtcctttccaatcattatgctttgtatacatatttctggtgctttctgcactggttaaaaccttcagtgcagtattgactagtaacagagatagtcagcatcattgacttgttcctgatcccaaagtgagtgccatccacaagtcacaattaagtaagaagttcactgccaggtggtcatgatgcaggtgrcagtacttgttttgtggatatttcttataaggatcttttccttcgctctaatttgttaaattcaacagatgttgaattttatttaatactcttttcttcatcttgagagatgacaatttttttccccttggtctgttaatatggtgcattttactaattgatttttaaatagaaatcaatatcgtatttatgagaagaactcarattggttcttatatttaccgcctttatacattgctagakttgatttgctaatattttgtttagatatttacatccatgttcataagtgtgattagtctttaattttgctttctattatgtagtatgtatatgatattcatagcttaaaatgaattaggaagggtttcctcttttataatctctggaaggctttgtacaatacttgagctacctatttctggaatatcttgtatatactactattattttcattttacagatgagaaaacatgcctattgagtaaaaggtagaactaggatgtgaactcaggtgatctggatccagatccttttcttaaccatttctctgtactgtctgtcaatagcattgctgaaatttgagctggtgtaataggaaatcatgatattatttgttaaataaagacctcataattgtatgaggtctttttattgggtagaaagtgattattaaagatgggaattttttattcatgtaagtaagaaaaacccttgacacagaaaaacattcaaagatatattttggatccacttcttgtagccccatacttcataatcaagaaaatagggttccaatctcctgtcaataacattcatttttttaaatagtagagttctcaaaaggtagctattcccttaaagagatatcacaagtaggaagataattattatgaccatgatgactacgagtaaagaagattaagaaagttagatactggctgggtgctgtggcctacacctgtaatcttagcactttgggaggccgaggcgatcacctgaggtgaggagtttgagaccagcctagccaacatcgtgaaacctcgcctctgctaaaaatacaaaaataagcctgacatgatggtgcatgcctgtaatcccagctgcttggaaggctgagggaagagaagcatttgaacccaggaggcagaggttgcagagagccgagatcgtgccactgtactctagcctgggctacagagcaagactctgtctcaaaaaagtaaacttgactgatgttacagatggaaatatgtgcagatctttaattgcattgctaggtagagcctactgtactgagcgtcacagtacrtcactttgcaatgactttgggctatcataaatataaagttgctagagtgtccttttttttgccccatatcagatttttcctatagaatccccgttgtaaaaaacagtgctcatttttgaggctctttctcttcccgctttagctcatgttgctttcgagctttagagagttacttctactctgcttgcgggaccctctctagacctcgcctttcttgtctttatttagccataagctttctrtcacctcctaccatctctctggcaggcaccttcattgtccttcatgcaggtctcacctcaatgctcattaatttccgtgtcttggaaccacctcyatagacgctaaggacaaacaaagatgaattttcctgacaacttaaatgcccatgatttctccttccttattgcctgttttgtttttttgagtgtgttccaattttctttcctcatgggtaatgttgctcttcttatttgactataaactcagtgaatagagacattgccctattctgtgctgtgccctggcacagaactgattctctctatacaagtcttactgttaaatttgctgcagtatgtggtgttggcaaacagaaactttcattacacatctttgaatcccattgcagcctcattaatattcttccctgttgtagaagataggtcactcctggtctttttccagagattcagttactatgtgctgaaaagatggccttttgtggtagtctcagtgggtgttccctatagactgtgttttgaaaggaaaagaataaaaatgatagcatattttttcttagttagccttctttcacaaatcctaggaaaatagataattcactgctgattaaaaaacagaacaaaacaaaacaaaacaaacccccctgggctttccaaaatctggttatattgctttctatgtgtcctgaccctactattatctgtcatttacctttactaaatctcactattgattgtaaccatgtaatccttttgattgttctggtttttctggaatgctttgttggtgataattatctagttgtcttttgaaggttgattgtaagtggctggagaagatgagggaatactcttttttgtttgtttttgttttgttttgagatgaagtcttgctctgtcacccaggctggagtgcagtggcacaatctcggctcactgcaacctccgtctcccaggttcaagcaattctcctgtctcagccttccgagtagctgggattacaggcgtgcaccaccacgcccaggtaatattttgtctttttagtggagacagggtttcaccatgttggtcagcctggtctcaaactcctgacctcaggcaatcygcctgccttggcctcccaaagtgctgggattacaggcatgagccaccatgcccagctgcgggaatactctttattaaaatttacctacagcattgcattgggttgcttttggggttatagaatatttaagttaaaatattaacacattgtaaaataaaaaagtaacgggaaaaaaggagttagaaaaaggaagagagctggtgtccaagtcctagtttacttttttttttttttttgagatggagtttcactgtgccacccaagctgtagtgcagtggcatgatctcagctcactgcaacctctgcctcccaggttcaagcgcttctcctgcctcagcctactgagcagctggaattacaggtgtgtgctaccayggccggctaatttttgtgttttttactagagatgakgtttcaccatgttggccaggctggtctcgaactcctgacctcatgtgatccacccgcctcagcctcccaaagttctggcattacaggcgtgagccaccacgcccggcccctagtttacttttaagtggaaagatgagaaggggccatcagacaaggtgatgtgtctggcaacaagtgaagagatcatagatttcatttccacagataagtcaatacagttatttaggaaatgagaaatctctgactctggtctttgtgtaatattctatgatagcagaaacaaaaaattgaattgtgcctattgttaaaagtttactttgtttatgatttctactgtatgaaattatatgatctgggttatattaacacccagtgaaaccaaggggctgggttggtacactgaaagttattataatataattctcatgtgaggctaattgttactatatttgtttttaatttgactagaaatcccaatatttaatcaaaagtcttctcctctacctagagcttgttttatcgttttggtggcctcctcttgcaaaggactggctggtgaatggtttccctgaattatggacttaccctaaacatatcttatcatcattaccagttrcaaaatattagaatgtgttgtcactgtttcatttgattcctagaaggttagtcttagatatgttactttaacctgtatgctgtagtgctttgaatgcattttttgtttgcatttttgtttgcccaacctgtcaattatagctgcttaggtctggactgtcctggataaagctgttaaaatattcaccagtccagccatcttacaagctaattaagtcaactaaatgcttccttgttttgccagacttgttatgtcaatcctcaatttctgggttcattttgggtgccctaaatcttagggtgtgactttcttagcatcctgtaacatccattcccaagcaagcacaacttcacataatactttccagaagttcattgctgaagcctttccttcacccagcagagcaacttgattttctacaacttccytcatcagagccacaagagtatgggatatggagaccactaaaactacatccctttggccttaccagggaaatattgggaaggaaggaccttgtattactacctaatgaccccatagtattgtttgacagtctatacaaccagatragcaggcaaggtagtaccctgctaaagagacaggctttctcatatctcataaatatttcacatcctggttctacatgctggttttattccatattagccatgaggtcttcagcaaattacttaatgtcattaaacctcaatttcttcatcctgaaaatgaggatgataataataagagtatatatctaataggcttattgtgaggattaaattaggtaatataggcaaagacctagcatacagtttgcttacaaacatcaacaaaagaaagagacaggaagagatgaagtgtgcaagagagagtgagagcaaccatcaatgtcagacagccaaaaaatrggcatatagatttttttataaatagacctcatatgtctcatttgcatgggcttttgggatgattaaagcctattgttctctaggattacttgaaatacacatttcctgcaggttacagcccaatggacacagaatgayttgtgtattagtccatccattctcacattgctatacagaattacctgagactgggtaatttrtaaagaaaagaggtttcattggctcatggttccacaggctatacaggacgcatcgatggggaggcctcaggaaacttacaatcatggcagaaggcgaaggggaagcaggcacatcctacatggctggagcaggaggaagagaaagcaaagggggaggtgccccacatacttttaaacaaccagatctcgtgaagactcactcactatcgtgagaacaccgcaggggaaatccacacccatgatccaatcacctcccatcagacccctcctccatcactggggattacaattcaacatgagatttggtggggacacggatccaaaccgtatcaacttgtatcattctgagtaattgcaactttcgaatgggtggtagggttggcaattgccaaaagccatggtttggagtcacttgcatcaggcctgggtttccccctggagcaggctgagcttggctgccttctaaggcctcttctgctctggacatttacaggcttctgagccaggagagaacactaagcaatgaaacacaggaggaaaaattaaaaacaccacctttaaattttggaaagtattttggagatacctgtgccctgctctctaaggagttcctgtagggatttctgcttatgaattccagtatattgtttctctttgggatgayaaatggagtttctrttgccacaccttgccacagacccactttttgaaaaacactaaaatccactttgcaagtgtataaatattgcaggcaggcagcttccacattctttggcaagggaacaaaatactatttaataatgcaggttccagcttttctcctgacaatgcaaagtgccaatgattattgaaaagggaatttgaaatctgccagaatccactcagttttccttgtgtggttacatttccatcctgtcaccctcgctagtgaagacaattgtttcagccattgagaaaaaaaaaaaaaaggtattttataagattgcaagaaagtgatttaaaccatgactatgtctgttaactgtttgctttgtttctctgactgtgtgcctctctagtcacccaatcttctttagctatcctgtgggctttttcctgttgtcaaaaagcatggtctacccaaagccattcttcaagcatctgatttcccagctgtctttctgctatatatttaaacttctagttctctttggggargagggtggtagacttgtgtgaggatatagtctgaatgaagtctccgagtgattttttgttgatgttataggggtgggagttcggggagaggagggagagtctttggcctcacactcccctctgagtcctgaatggggttctctcagcatctcattttcccgctaytcctgacacactcctccctgaccctattttagaggtccctgttatcaaatggaagtgcttcttatgtcttccttcattctgctaagctgactgttctctatagaaatctgtacccccagcttttctaccaatgcgaatcttcgtttttggaaaatttcttttaccttctctaggaaatcattctctacatcactctatttctttagcaatcagggactacatttggatgtataagtatatacatattaagtttctagatattctttttctttttttaaaattattttttattttattattattatactttaagttttagggtacatgtgcacaatgtgcaggttagttacatatgtatacatgtgccatgctggtgtgctgcacccattaacacgtcatttagcattaggtatatctcctaatgccatccctcccccctccccccacgccacaatagtccccagagtgtgatgttccccttcctgtgtccatgtgttctcattgttcagttcccacctatgagtgagaacatgcggtgtttggttttttgtccttgtgatagtttactgagaatgatgatttccaatttcatccatgttcctacaaaggacatgaacttatcattttttatggctgcatagtattccatggtgtrtatgtgccacattttcttaacccagtctatcattgttggacatttgggttgcttccaagtctttgctattgtgaatagtgccrcaataaatatacgtgtgcatgtgtctttatagcagcatgatttatagtcctttgggtatatacccagtaatgggatggctgggtcaaatggtatttccagttctagatccctgaggaatcgccacactgacttccacaatggttgaactagtttacagtcccaccaacagtgtaaaagtgttcctatttctccacatcctctccagcacctgttgtttcctgactttttaatgattgccattctaactggtgtgagatggtatctcattgtggttttgatttgcatttctctgatggccagtgatggtgagcattttttcatgtgttttttggctgcataaatgtcttcttttgagaagtgtctgttcatgtccttcgcccactttttgatggggttgtttgttattttcttgtaaatttgtttgagttcattgtagattctggatattagccctttgtcagatgagtaggttgtgaaaattttctcccattttgtaggttacctgttcactctgatggtagttttttttgctgtgcagaagctctttagtttaattagatcccatttgtcaattttgtcttttgttgccattgcttttggtgttttagacatgaagtccttgcccatgcctatgtcctgaatggtaatgcctaggttttcttctagggtttttatggttttaggyctaacgtttaagtctttaatccatcttgaattaatttttgtataaggtgtaaggaagggatccactttcagctttctgcatatggctagccagttttcccagcaccatttattaaatagggaatcctttccccattgcttgtttttctcaggtttgtcaaagatcagatagttgtagatatgtkgtgttatttctgagggcyctgttctgttccattgatctatatctctgttttggtaccagtaccatgctgttttggttactgtaggcttgtagtatagtttgaagtcaggtagtgtgattcctccagctttgttcttttggcttaggattgacttggtgatgtgggctcttttttggttccatatgaactttaaagtagttttttccaattctgtgaagaaagtcattggtagcttgatggggatggcattgaatctataaattaccttgggcagtatggccattttcacgatattgattcttcctactcatgagcatggaatgttgttccatttctttgtgtcctcttttatttcattgagcagttgtttgtagttctccttgaagaggtccttcgcatcccttgtaagttggattcctaggtattttattctctttgaagcaattgtgactgggagttcactcatgatttggctctctgtttgtctgtcattggtgtataagaatgcttgtgatttttgtacattgattttgtatcctgagactttgctgaagttgcttatcagcttaaggagattttgggctgagacagtggggttttctagatatacaatcatgtcatctgcaaaaagggacaatttgaattcctcttttcctaattgaataccctttatttccttctcctgcctaattgccctggccagaacttccaacactatgtcaaataggagtggtgagagagggcatccctgtcttgtgccagttttcaaagggaatgcttccagtttttgcccattcagtatgatattggctgtgggtttgtcatagatagctcttattattttgagatatgccccatgaatacctaatttattgagagtttttagcatgaagcgttgttgaattttgtcaaaggccttttctgcatctattgagataatcatgtggtttttgtctttggttctgtttatatgctggattccacttattgatttgcatatattgaaccagccttgcatcccagggatgaagcccacttgatcatggtggataagctttttgatgtgctgctggattcggtttgccagtattttattgaggatttttgcatcaatgttcatcaaggatattggtctaaaattctcttttttggttgtgtctctgcccggctttggtatcaggatgatgctggcctcataaaatgagttagggaggattccctctttttctattgattggaatagtttcagaaggaatggtaccagttcctccttgtacctctggtagaattcggctgtgaatccatctggtcgtggactctttttggttggtaagctattgattatkgccacaatttcagctcctgttattggtctattcagagattcaacttcttcctggtttagtcttgggagggtgtatgtgtcgaggaatttgtccatttcttctaggtattctagttgatttgcgtagaggtgtttgtagtattctctgatggtagtttgtatttctgtgggatcagtggtgatatcccctttatcattttttattgcatctatttgattcttctctcttttcttctttattagtcttgctagtggtctatcaattttgttgatcctttcaaaaaaccagctcctggattctttaattttttgaagggttttttgtgtcactatttccttcagttctactctgattttagttatttcttgccttctgctagcttttgaatgtgtttgctcttgcttttctagttcttttaattgtgatgttagggtgtcaattttggatctttcctgctttctcttgtgggcatttagtgctataaatgtccctctacacactgctttgaatgtgtcccagagattctggtatgttgtgtctttgttctcgttgctttcatagaacatctttatttctgccttcgtttccttatgtacccagtagtcattcaggagcaggttgttcagtttccatgtagttgagtggttttgagtgagtttcttaatcctgagttctagtttgattgcactgtggtctgagagacagttttttataatttctgttcttttacgtttgctgaggagagctttacttccaactatgtggtcaattttggaataggtgtggggtggtgctgaaaaaaatgtatattctgttgatttgggttggagagttctgtagatgtctattaggtccrcttggtgcagagctgagttcaattcctgggtatccttgttgactttctgtctcgttgatctgtctaatgttgacagtggggtgttaaagtctcccattattaatgtgtgggagtctaagtctctttgtaggtcactcaggacttgctttatgaatctgggtgctcctgtattgggtgcatgcatatttaggatagttagctcttcttgttgaattgatccctttaccattatgtaatggccttctttgtctcttttgatctttgttggtttaaagtctgttttatcagagactaggattgcaacccctgcctttttttgttttccatttgcttggtagatcttcctccatccttttattttgagcctrtgtgtgtcactgcacatgagatgggttccygaatacagcacactgatgggtcttgagtctttatccagtttgccagtctgtgtcttttaattggagcatttagtccatttacatttaaagttaatgttgttatgtgtgaagttgatcctgtcattatgatgttagctggttattttgcttgttagttgatgcagtttcttcctagcctcgatggtctttacaatttggcatgattttgtagtggctggtaccggttgttcctttctatgtttagtgcttccttcaggagctcttttagggcaggcctgctggtgacaaaatctctcagcatttgcttgtctgtaaagtattttatttctccttcacttatgaagcttagtttggctggatatgaaattctgggttggaaattcttgtctttaagaatgttgaatatyggcccccactctcttctggcttgtagagtttctgccmagagatccgctgttagtctgatgggcttccctttgtgggtaacccaacctgcctctctggctgcccttaacattttttccttcatttcaacttcggtgaatctgacaattatgtgccttggagttgctcttctcgaggagtatctttgtggcgttctctgtatttcctgagtctgaatgttggcctgcctttttagattggggaagttctcctggataatatcctgcagagtgttttccaacttggttccattctccccgtcactttcagatacaccaatcagacgtagatttggtcttttcacatagtcccatatttcttggagkctttgttcatttctttttattcttttttctctaaacttcccttctcgcttcatttcattcacttcatcttccatcactgataccctttcttccagttgatcgcatcggctcccgaggcttctggattcttcacgtagttctcaagccttggctttcagctmcatcagctcctttaagcacttctctgtattggttattctagttatacattcktctaaatttttttcaaagtttttaacttgtttgcctttggtttgaatttcctcctgtagctcagagtaatttgatcgtctgaagccttcttctctcaactcgtcaaagtcattctccgtccatctttgttctgttgctggtgaggaactgcattcctttggaggaggagaggcgctctgctttttagagtttccagtctttctgctctgttttttccccatctttgtggttttatgtacttttggtctttgatgatggtgatgtacagatgggtttttggtgtggatgtcctttctgtttgttagttttccttctaacagacaggacccttagctgcaggtctgttggagtttgctagaggtccactccagaccctgtttgcctgggtatcagcagcagtcgctgcagaacagcagattttcgtgaaccacaaatgctgctgtctgatctttcctctggaagttttgtctcagaggagtacccggcagtgtgaggtgtcagtctgcccctactggggggtgcctcccagctaggctgctcaggggtcaggggtcaggggtcagggacccatttgaggaggaagtctgcccattctcagatctccagctgcatgctgggagaaccactgctctcttcaaagctgtcagacagggacatttaagtctgcagaggttactgctgtctttttgtttgtctgtgccctgcacccagaggtggagcctacagaggcaggcaggcctccttgagctgtggtgggctccacccagttcgagcttcctggctgctttgtttacctaagcaagcctgggcaatggcgggtgcccctcccccagtctcgctcccaccttgcagtttgatctcagactgctgtgctagcaatcagcgagattccgtgggcgtaggaccctccaatccaggtgcgagatataatctcctggtgtgccgttttttaagcccgttggaaaagcacagtattagggtgggagtgacctgattttccaggtgccgtctgtcacccctttctctgactagcaaagggaactccctgaccccttgtgcttcccaagtgaggcaatgcctcaccctgctttggctcgcgcacggtgcactgcatccactgtcctgtgcccactgtctggcattccctagtgagatgaacccggtacctcagatggaaatgcagaaatcacccgtcttctgcgtcactcacgctgggagctgtagaccggagctgttcatattcggccaccttggctcgacccctctctttttcttaagaatatatgaattcctatgaagaatgaaggtttagtcttgatttcatttcccttcctatcaactggacaataaaaatttgatctttaataaatataattgaagacttactgatacactgaagcctattctatttcaaattaatgttttatgtcttgggcatgcttcagaagtaaccatttacataacaattcttctaaggcataatgttgcttaatcaatttagcatgatatagtgaaagttaagatttatttttacttttctgaaataaaatgcttaatttttatattcttccaagtaataactgtcatatgcttatatggggaagattcaaaattaatgttttattataacccagtaggggtgggtctaggggagggatagcattaggagaaatacctaaagtagatgatgggttggtgggtgcagcaaaccaccacggcaagtgtatacctatgtaaagctgcacattctgcacgtgtatcccagaacttaaagtataataaaaaattgataaataaataatgcaaataatctatakttacaataataagtgagggtatgctcttgacattttatttattttttaattgtacacttttgccstatgtgcattttgctggtatgtctctgaacatgacctttgctaaattaactccttcctgactttacttttgttccagtgaggggtgtttggctgttcttctttttggtttaaaaagcctttatattacagagtggtcagtttgctgctagtcactgagaagaaatgtaatgtgtatcctgatgactggatgacttataagcttataatctttttgagctctagtacatacttaactgtacttggcttctgaccttaaacatcattttccaaacagtcttgatgtttggtaaaaccagtaaccatccattactctcaggccacatcagacctgcttacagatatcactgggtgaaacatgagtacacttgttcaccccaagttcctttcagaggccttgaaggacactgctaaaacacatccagtgagttcagggaccctgatcacaggaagaatgcctgcctgatgttggaggaaggggtaaagccaacgcctgaagctttctctgtgcttctctgtaacagtcaccagagctacaggccagcagcacttttcttttacatggcaccttcctctcatttgtggggaaaataaggactttattagttcttccatttctcttaccctctcaggattatagctttatcatccaaatgccaggaaagtaaaacaaaacaaagttagacaatctaaattaaactctctcaacattatagggatgaaggaccttcagagtactagaacttcttaaaaaaaatctcttgcattgctacatcagtttccaacacacatattatttcattcaaatgttaagaaggggaaaagaatgttacagtgtactgtaattattttaggttcatgatgaaaatgctttacaagggtgggcgcggtggctcacgcctgtaatcccagcactttgggaggctgaggcgggtggatcactaggtcaggagatcgagaccatcctggctaacatggttaaamcccgtctctactaaaaatacaaaaaattagccgggtgtggtggcgggcgcctgtagtcccagctactcgagaggctgaggcaggagaattgcgtgaacccgggaggcagagcttgcagtgagctgagatggcgccactgcactccagtctgggtgagagtgcaagactccatctcaaaaaaaaaaaaaaaaaaaaaaaaaaagaaaagaaaaagaaaatgctttacaaatatgaaaactcctccctggttttttttgaaagcttaatgtttgyctaacaaaaccgtaaataggattctataatattgatgttagaaatgaatttatatttttctagttttaagggaatagctgtatattactttagatggtggtactatataaaaatatgttttcccattacatccaaaggtgaygatattaatttattgctagagaaagaattgatattgagttatagagattttccagaaggtattttaagaccctttgctggtcctttgtgactggcgtcatgtatgttacacagcaggttgaaagtgacatgctgtgattctggaagagtgtgagtctattggccctgtaacccatgagcttkttttcactaacccagtgctcaaagcaaattaattcacccacgaagtttgctttaacacttatctaagcgttactatcaatgttctaggaagtaacaagtatcattgctgatatacagctctgagttgactcataaacatttctgatctcatgagatagttgcagtggtgttttgctgtgtttactagatgcaactaacaaacaccatgagatttacaaagagatttgaagatatctgtgtctccaaaattgattgcaaggtgtagcaggggccagtaaggtgagctttcttccactccctagaatgtcttcctcaatccagattttaaagtgtattgaaatgatagccggctgaatcaccaggtcgaaaggatcaaccaactatttattaagcacttcatgtattttctgtcccatagagatttcagtgaaagatatagtgtggataaaacaaagagaaaaaagtgtcctcatgcttatgacttaatcgcagaagtggaacttagacatgtgaaacaattaaacaatttcacaacaacagataagcaaatgggatgctttggagagacatctggtccctgtgctgtttatagccaattccagtggtgaataaaagaagtggaacgaactgcttttgaagggagtgcatcctgatcctctggcagcaaggtagaggttttctgccaggagggaacactagacggaggctgtttgttttttctccaaacagaaatctcttccatgctaataggagcttcaaaaggattgccacagcagatggaaagaaccaatatatattcatgcatttaattagcaggaattaattgaattgggggattaattctgtcattagagagaaacaaaacctatttttgtctcccatctatggttacacaatctaagatggatttggcacaggtggtgtttgaatataaagccaccgtagtatctaatggccttttgatgccactgatggattaatcccagggatgatgagaaggtagccatgtgagatgtgtgctctgcaccatgtttcagcagtggaggagaagctggtaggtggagtgtgaggggtataaacctagaattcagtgagtgtttgaaggaggaaaaaggggaggagattgggagagtctcttctcttacatctgatttttttttctttttctttttcttttttattgagacggaatctcactctgtcactcaggctggagtgcagtggcgtgatctcggctcactgcaacctccgcctcctgggttcaagcaattctcttgtcttagcctcccaagtagctgggactacaggcttccaccgtcatgcccagctaatttttgtatttttagcagagacaagtttgtaccacgttggccaggctgatctcaaactcctgacctcaggtgattcacctgcctcggcctcccaaagtgctgggattacaggcgtgggccacagtgctcggtcacatctgattattaatgagagattaaggacagacacacctaagacagaatttttaattcaatctaacaagcacccattgcctggtcttccccctgcttttctttttttttttcttctccaaaaatctgttcctccagaaaagcagttttcatcctttttaatttttaggccaagatactcatgacataaaccagatgacattgtatgcataacacattcccataagtgacataggtaaaaagactgttgattatacccctttcccaacactgacaagtcaacaccagccctccgactcaaagcacatcacaattcaagtatatgatgtgacagtttgtacttttcaaaaatagccatggcattttctcccacctacacactcatcttgcaatgtgactttgatgctctttccattgaaatgtgggatctacgctctctctccttgtatatgcgcaaacgtggacttcagcaggaatgataccttgggatttccaaggcgaggtgagttgatcactgggctctcttgggatggttgcttttggaacccagccaccatcttataagaaagcccaagaagcacacgggaagcccaggaatcccacatgagaggatccaaggctcctagccgataccagtacccagttactagccatgtgtctgatcatatttgaactggatctttcagctcttagtggagcagctccaactgctgccaggtataacaaagacaaactatctctgcagaacgctgccccaaatgcagatttttgagcaaaagaaataattgggttttaagtcatatactttaccatgcaataatagatagttgatacagagttgcatgtcattagaagaataatcttaaatctgttctaatatgttaaaaaccttcagtagtttaacttttattataacaaataatttgtcacatgtctttttactgattgtgaaaaagtcctctaggcctagataaaaatgcagaggtctttagaaatttatataattcattctttttctcacctcatcttggacttattcagtatgcctatgtagaataatattaattacagtcatttttcttgagctgcttcccatttatgcctcattagcataattcacagcggtcatccatacctgtgaattcgtgttagattacctttgctgtgtttgatgrttatactaaatttcatttttttgcgagctaagccttcacagtttgttgctcatgtaccatggctggctgctcacaaaatagaaaaattggacagaatgtttctgataaggtaaatacagcaaaggctatgcagaaatatgtatctcagagagtgagctatkgggcagctatggtataagttatctggtagccacgcaagaagtaacggattgaataaaggcaaactatgaagacttcagtcatgataagatcaagagaattatttgtgtcacatttgcgatggattttgtctctgttggcacacacaaaaagttgggccttaaaactgtaaatttactttaacttcattttgtatgtcatgcattcatgaaactttttccgggggttattttcatttttggctgtcctgctccaagttaaacagaggagaaacagcatcatatagtggaagaaactcagacctggggaaggggggaggcaagtaaatgaaacaagagtcctttgtctctcagctggattgctaagtaatctgtgtgatcctgcaaaggtcagttcagatctcaagccctactttcctcatctatgaaatgaaaggttagactaagaccaaatacacgctagaaagtagagtattattactcctcaagaaatagtttagggttgtgactcttgctttgcacatgaaaatatttaggagtaaaagttcacagaacttggcaaagctagatgcatttatgattcccagtgaatcaactgatgtttttccctayrtctyttcaagccattctttgtttagcagtttttatatttacttttatttttttcttctataattttggaaaaaaagagttagctgactgctactatgggcagacaacaatgtggyaataggatattatttttaaaactaaaaaataactgaatatgaaagatcaaacttttaaaaaatagacataagtgttcagagttgtgattctattttgcatgtaacaatgtagttatttcagttgctttattgagaatcacaaacatatatatatggctttgccaagttctgtatactttttattccccaatattgtcttctgtacagcaataattacaaccttaagccatcccttcagaagtagtcatatgccaamttctacctyagtctaaaataattctttttctgtgtgatggggctaaaaacatcarttctccctgctgctctccacagatgtccaggtaccttaatggttaggttctctgtaccttgagcttatttgcaaggcagagcctcaaaagaactgctttttwaatttttccactgatagaactggagcttggtaaactaacttgcccaaggtcatagcagttagtgatactcacaggacttaaacccaggaggtctgaatgtagactcaattatggcatatcccttcctaataataagccagattttgttttgtacttcttgccaaaatgtaactccatgatgacatttgttttgtacattgctgccttcttactgcctcaaayggggcctggcatggtgggaacaggtggggatcttagtctgttcctgctgctaggacaaaatatcttagactggatcatgtttaagtaatagaaatttattkctcatggttctggattctgggaagaccaagatcaaggtgctagcaaattactctctgcttcaaagatggaaagctcttgctgcatcctcacataatgggaaagcaaaaagaaatgaaaactgtgtcctcacatggtggaaaagatagaaaggacaggcagctttctcaaggctcttttagaagggcaytgatttccttcatgagggtggagccttcgtgacttaatcacttcctaaaaggccccacctcttaataccacactggggattaagtttcaacatgaattttggagggtttatacaaacatacaaatcacagcagctgtcttctccctttcctgattccacatgacagaagccatctcttccttccgcacrtggatgtctgagcacatccagactcttgagagcccagacttaagagagagaggctgtgagaaggaagatggcagttctctcctggaagtcttgacttctcagtcccagytttstgtgttggtatgtgtactgaaaaacaatttatttgaagatacagcatagaaggaaaaataaaccatttcctatgaagtaatgattcaacttctaacctgtaaaaatgaaaaatttctcagttccctacgcccttgcattcctgtcttcataagtttgtgatttaattttccaagaaacttaatattcatatacttaaaaacttttatatccattaacaacttgactttccctgcttctttgaattttggagcattgtttccttagtatgaaggagttttgagaaaggcaagaagacaagctcagagcttaagaaactatgaagaataatattgtaatcataacaactcattatttgtttttaagctcaatccttcagaaggttattatctggagttgaataataatagattcaggctctttttatgtggaggaaatcttaaacaacagtgttcatagggaaggacattaatcaggagagagaagtgagccttgtttctaataatgtttgcataatagctacccttgggtgtattgcttgacttaaaataaatattcatgcttttcacatccagtacaattggaaactactcgtggttatgattctgtcatatgatcttctacctattcaaggggacttcaaactgggaagctgttggaaaccaacaaacataaataacaaygcttgggagcgatatggggtacaagctgaaagatgctataatgttggctatggggagaaaaggagcgaagagtaggaacttaactgtttccagagggggggaagcagactcacactgacatgcttaaggacatttatatgctctcctggtttgcttttagctcttcaatagcttctcatcaccaggagaataaaatttaagtgccttatcttggtgtcagactcactccttggagtggttcctgtgaaaccttggatcgcgttacctgagactactctccacctcagatgtgrcaacacaaagctctttgcagattccctcagacaccatgacttacttttatctctttgttcacatccttccttcatcttgcgaggatttttcaaagcttctttgttaattaatctatgtatcattgaagagtcagcttaaacttcacctgcttcaggaagccttctatgaactccacacctagtcaagagttttacccagactgtcctatttttattaacttatatatttagtgatccttaaatagcctttgtcctggggagttttttcatcatcttgctttattgcttacatgtacctaattttattacataaatgctttcagttagttaattcatttttctttccttttctgkctcctttctcctttctttmtctgtttctctctctcyctttttattaacttttaaattctgagaaatgtttcaatacagtcttgagaacataggctattttgttgttgtttttttgtttgttggttggttttgagacagagtctcgctctgtsgctcaggctggagtgcagtggcatgatctcggctcactgcaacctctgcctcccaagggttcaagcagttctctgcctcagcctcctgagtagctgggattacgggcgcccaccaccacacctggccaattttttatatttttttatttttagtagagacagggtttcaccatcttggccaggctggtcttgaactcctgacctcgtgatccacctgccttggcctccyraagtgctgggattacagatgtgagccaccatgcctggctgagaacataggctatgttttgaacttctgtgtgtgttacaaggctttgcattaactgctccctcatgcaactttcctaaccttctttctctcctattagagacattctgcttcagtcaggagaacatcctatagtattaaagtccaaactgatttgttctcttggacctgtgattgctaatacagctgttactcagtatctgtgggggattagttccaggaccccttgcagataccaaaatctacagatgttcaagtccctgatctaaaatagctcagtatttgcatatagcctttgcacatcctcccgtacacttcaagtcgtctttagattacttataatacctaatctaatrcaaatgctatataaatagttgttatactgtatttttaaaatttattgtaatttttactgttgtatcattattattattttttgaatgttttcgatgtgaggttggttgaatctgcagatttggaacctgcagatacggagggcyggctttactttccccagcctctccttccttgtccttcaacgcagggtttttgataaacaccayatccttggctcattatctgtgcttctaatccgatgggttctatattaacagagatatgtctgcccagcttcacatgccaattttacccttattggtaggctccttctgaaggtccatatgtctttttcatgtacttatgtgcagtcacaaaatactgaaaactgtgccttctgtttatataacatacctatttataaaacactttaaaaattttatcctaactaccgagaggtgagcagtgcagctgttaacctcatttgcaaatggagaattggttcaaaacgattgaataacttccaaaatttatgtgtccaataaattgtagcgattagaattagactccagttgagagcattgttcacattacaaacctgacaacagtgtttttttcactgtctgtaggccttgcagagcctagtagagttctgtgcatgatgaactcaatgggggcactggacacaggctcacacagggtctgtattatggtgctgatttgggcctctatacctccagagaattaagttactttaaactccactatggacatttataaaaggaagagtgagacmctgtgttttcatagggttttttttttttttacacataacactttgttaattccctttctcttattttcatctctcttttcttctctttttctgttttcttttcagtcagttcaacaattaattggtgtgcacctacaatgtgcaaagcattatgctagggttcacaggggaatgcaaagaggatgctgcttatagcttgttatggcgaggcacttttcttctctccatttttctccattcttctcttcttcctaccttctttttcctctgatgttcaagtagccctcatcatttctataaatttccaaggcttcagcrttggtcaaagggaaggcactcagcccaggggcagtgagtaagtttaacattcttatggtcctttgcatctgctcacccaggactcatacatactcaatataaaagctttgggggttttgctcagtgacagctggggactctatgtaatttaatgcatgatacagcacttttggctaactctgtatgagagactactcaaataggaataaaatatcactttgcaaaatacatttaaattatttttcttctaaaactttgtgactttaaagccttaaaatctattttttgaaagccaaaaaataacagatgttggtgaggctgtggggaaaagggaatgcttatacactgttgttagaaatttaaattagtttagccactgtggaaagcagtttggagatttctcaaagaacttaaagcagaactaccattcgacccagcaatcccattactgggcatatacataaaggaaaagtaatcatcctaccaaaaacacatatgtactcactgttcatcttagtactatttacaatagtaaagacctggaatcaacataggtgcctatcagcagtggagcagataaagaaaatgtggtatatatacaccatggaatactacacagtcataaaaaagaatgaaatcatgtcctttgtaacaacatgggtgcagctgaagaccattatcctaagtgaattaatgcagaaacagaaaaccaaatattgcatcttcttacttgtaagtgggagctaaatcttgggtactcatggacacaaagatgggaacaatagacactgggaactctagaaggagacagggagggggacaaaggctgaaaaacctcttgttgagtactatgttcactgtctgggtgacaggatcaatagaagctcaaacctcagcgtcatgcaatatrtccttgtaacaaacctgcacatgcatcccctgaatctaaaataaaaatgaatttttttttttttttttttttgagatggagtctcactctgtcgcctgggcaggagggcagtggcgcgatctccgctcactgcaactccacctctcgaattcaagcaattctcctgcctcagcctcccgagtagctgggattacaggtgtgccaccactctggctaatttctgtatttttggtagagacggggtctcaccatgttggccaagctggtcttgaactcctgacctcaaatgatccacccaccttggcttcccaaagtactgggattacaggcatgagccaccatgcctagcctctcattcctcttctacaccccacataaggtgcatgaatcattagacacrtatatttttttttccctaaggctacgtattcctaaaagtagtttaagttacctattacctctaggcttttttttccataagaatcatcaataaattaaatgccaaacacgtggttgttttctcaagcacacaattaaaatagacttgattcctctttgctgtctccagtcctcttaatattcatagcaataggtatttatctatcatcacaaaacacacaaaaagactggtgattgcttaaatcccaagagggcaaagtagaaggaactagaaagaaggaagcaagtgcaatcatgattaggcagttactccgcatctgtggctgggttaggaacattcataggacttcatgaaccctactaagttacaacctgctcttttacaaatgtggaaactgaggctcagaggggttaaatgatttrcccagtgtcctactgcttaaagtatcagagttgagatttgaacccaatttgcgtgactccagtttttaaaatatttactgtaccaaggctggagggggcacgcatgggccctagaagggtgcgtggaatgggtacctgggtggggaagggttaaagagggggcctcggtctgcttsaccaagatattttccttccctgattcctgccccaaatgtagactacttatccaaaatatggatccaactttgtgtaatattttaataagagggtcttctactaatgggacatctctcttttgtctttcacagcaattttgcaggcagtaatagctggtgatcttatgaaggtaagatatcttcctaccaaatctttggcgatgctttaagaactttaaatcaacrtcattcctcatcaaaactctatgttcccatctatcatttatcatcccctgcttgcactggctgggtagaagaggcaggatgttcttttgagaactgagcagagatggtgttcaagagcaccggggtacttgtctcagttacttaaaatgaactgcatgtccccaggatgcaatgtgcacagtgtgcctgccctctagaagctgacatttgaagaatttaaagatttcctttcaggcaggtattgaaatgaatgtatctgtaagaattacctgggcaacactcagaaatgcatccttcaggccagagattaatctttccttgtcgtggttttatactttggggatcatagttagtcaaacaaggactctcatagttagtcaaacaagaaccctgatccccttggaatagtttaatttgtgtttgtgttttctggtgagttttgttcagaaggaaggaagcggtcaccactgccctgagggtgaatgtaaaatctgaagtcagactttctaagtttggatctcggctctaccattcactgtctgtgtgattttgtgtaattatttgattctctctgtgccttagttttttcatcagtaaaatggagtaatattacctctctctttggcttgtcatgaggaattaatgtaataatacatataaagctctcaagactgttcctatttcatggaaggggctctaaaatgttagctattttattaatattctgatagtgtagatctgtgttttttaatagctaaacatggtggaaatacaaatatttgttatataatataacatcatctatgaatattctaaagctatatttggttttcaggcatcaggctgatgactgcccatatgcccctgcaaaccccctgctggaactgatctgctctgtattaatgacagctgcctgaaggcagaggctacgcctgactcctcagcctgtggagtgaggtgccattgcagatcaaggaaccaatagccctaagagaaagctgaacagtcctaccctcagacataactttttttaggcgcatctgttggacaaactgaaggacacctgtgctgcatttttcaacaggttactagagkaaaacaaatggtgaaaatgtttgcaaacatcttgatcaactgccccctttaggcacataatcctgaaaacggtgcctgtgccactgcmcagatcatagtgtcaatagaaattgttacccagaagagaagagtgctctccaagcagtatattgatgagtwcagtgccgtttcttaccagtggattaagcccataccatcctgtactctgtgcaaggccttccattaggttttgtgggaaacaaaggcatgaataaaattgattcctgcccttggtggatttctacaccagaaaattttgcaaagcactgtacatttgaaacccttccattttattttctatatgcttttagttcaggcaactgatttcccaagatcctgagtttattatcacacttttttttgtacttttaaataaagaatcatttgcaatgtgggaaatcactatatccagctggttgtcttattataggttggtgcaaaagtaatttggtttttgtcatttcagtgacaaaacctgcaatcatttttgcaccaamctaatgcattctctgttataattctttcctaaatgactaaaacatgacttaataacaccttattttgtttttgtttttggagatggagtctcgctctgtcacccaggctggagtgcagtggcacgatctcggctcactgcaagctccgcctcccgggttcacgccattctcctgccttagcctccctagtagctgggactacaggtgcctgccaccacacccagctaattttttgtatttttacttgagacggggtttcaccgtgttagccaggatgatctcgatctcctgaccttgtgatccgcttgccttggcctcctgaagtactgggattacagatgtgagccaccgcacctggccaataacaccttatttactgagagatggaatatttactgagggcttaaggttttactttttctctcttacatattttcttattttccttctcaaatattcatgccctcttcctcttctccaatatcttttgtttctttcttctgagcagaaagtgcaatatatataaaatattaaatgggatacatgtgtatatgtttgtatgagagagagggagagaaagagagagagagagagagacaaagagagcgagagatagagactagcgaagagaacatctctggagccacccctgtgtgaaggctgtcacaaatagctcctggacaactgggctgcagaaagtgtccgtggactaactgaatgttcatggtgtctagaaacagcacaggaaggcaggatcaaggcagttgaccctgaacaggtcccatgctgctatcctttgtcgatctccccacaaagaaagggagtgtcattttaagacaacgcagttgaayrgaacaggatatccttttagagttttgtggaaaattgctagctacttcttcctgccctcttgccccccagtttagggatgttccttacctccattgtccttacctccattcagctactgctttggatccatgtcctgggaggtcttccgtggctgtttccatcccctgcttcatgcttccctagtgcttctctgagacctttgtgatgttcctgtccattactgtgtgattctttacctatccgtctccaccatgggctgtgagggctttgagcacagtgactgaattgtattcacatttatcttcctggcatctagcacatgacaattctatggatgtatttgagtgaagacgtgaactctgaatttaggttctttttttaagaaagtatttttaattgacaaatgattatacatattaatagagtacatagtgatgttttgatacgtatacagtgatcagatcagggtaattagcatatccaccacctcacacatttatcatttctttatgttgggaatgttcaacatcctccttctagctatttaaaactatttaatatattattaactatagtcatcctacaatggtatggaacactaggacttattctttgcatttaggtcatttatgctstttcaccttatgggatgtttgattatctataatgtgtgccatctaacttcttgagagataatgtgttccttttgcttattacctgctgggttatttaattctcatttgtcctaaaattacctgttagaagcttcatgcaggcactcttgtcatgaaatactgtagtttggagatgagggactcattcacattttctgtaatgttcaatattttataaacttagaccatatcctcatgtagccaccttatcctcaggctacaaaattctgttttgttttttttttccagtcttctytcatatagaaactactacattttctgaatcattttgggtctcactctgtggattatctctagcctattaggtatgtgttggatgattaacagaaggtttgcaggctgggctgcatatctggatgaagaaggaagccagatgtgtgttcgtgtgtgtgcatgcatgcatgcgtgtgtatgtgtctatacttgtattcagtgatcttacatgggagaaaaagaagcagctttgatatttggtatataggttcataagactgaagaaaaactgaaggacacaggcaagaagcttagctacagtcaccaagctatttctgcttatagccataattactctttcactcaggagaatgctaagccaacatagagatgcttttgttctcmactccacccctcactactccttcgagagagagaccatagagaccagtgctcagaaaataaatgaaaaaagtaattcagcatgattcagtttccctagcctgttcaatacccacagactctctccagagttagaagagacactggtcatctctgtgagtgataacacagtccaggaatgttacttcacctttttgacttttctctatgtcctctaaggctggaaacattgtggtctgctacatgactctcattttattaccggttagctgttatccttgttccgrattctgcctgagcttctttttgtatgtctctctttgcagctaatagaaagctataaaaatggaggcagtctgctaattcagggaccagaccactgttcactccttcactacgcagctaaaaccggcaacggggagatygtgaaatatatccttgaccacggtaagtaggcatagtgaacttaccaaggatcacttacctgtgaaatccattgcattttgcattttytaagttacccttcatccaggcagttttcagaatggcagaaatactctcgaacttttagcagactctgcccctgcttatttgaggcagtcgtggttgcagaccactgacacatacgggccatcctatccaagcaattagtagaaacagtgttcataccaagctctttacaggctatttttcagactaattagtttttttttttaaatagaggacaaaaataaatgcagcctggcatcgtgtgctttatttttttctagagctcttctgtaaattaatgggttgggattccctacctcacctgtatttgcggttcatcgttgtgaagattcatgaggataattgttttgcatctttccagtttctcatttttttttctgtttgatctcatttatcttttccacccaagttacgctttattctctttgaaaatgtctggtactattgtgttgtctgtggcagatcatactaaccttccagactgctttctaactggatttctaatagttggtgccagatcgtttgcaggaagtagcatgcgctatagcatctgcctctaaaaaccctttggaagcataaacatatttaatgaataccaaatctaaactgttacattgaatttatcatgttttgtagtatttctaggaataaagaacaggaataaaggggaaaaatactgcctagctagtctgttttaaatgagaaggaatgaaagagtctaattctgctggatcttggtatacagagagattggaaaagtttctttgagccctgacagtcagcctgtggctgactccttttgtacccaaattcagcctgtagatagtaagcatactcataaacattcacatcctttttgctcctttttttttttttttttttttttgcaattcagcaagtatgtcttattccattcattgattcattcatttaacaaatatttgtgtagtgcctaacaggagctgcctgttatagatggtacacagacaaaaataaaatacagtcactgttttcaagcaattgcaggctaaagaaaaaaataagatcatgtgtataattaaatttaaaaccgatatatggagctgttttaagtcctatggtaaagccacagatagataacatagctaccatttatcaagcacatatttgccaattgtttatagtaaacacatcccgtcatttgacaaggtccttgcaaggtaggtactaaactatcaatcacgttagacaccccttgctttgtcttcaacaccttctcactgtgaagattctgcttgaacccttggtctgaaatacggtagaaagggtgggttagaaaaaggaaagaccatgaaaacaggagggctgcgatgacagcatttctttactccttgtaggctgggttggataatcccaaacctgtctgccctggaaagcctaggtagataggatgtatttttggtgctaagtctggggcttgtatcattccatctcctatttccctggctattcagtctcttgcagttaaaagcgttcctttctgggcaagagtgaagccacactaatatctcaggatttctactgcacaaagctcaggtgagggttagatgtatactgtcactttatttttgtttagctcaggtttaaarttctcctatttgctgtcttcttgatcacttccaatctactctctttagtttaccctttacccaagagattgaatgcttgcttggataccttaagccatttggtgcccacctaccctctctctggagttaggtgagacactggccatctatttgagtgacaacacaatccaggaatctctctctccacacccccccacccatcttttcacctttcctggagaagcagtatttcctcccctagtcctaggatcctctctgtatccaccgtctcacttggtctcatttaggaggctgcagtcagctcctttttttgatgaggctttgttgaagatggactctcacatgtttggggctttcagctgggagggctgtggaaggccaggacacctaagcctttctcaacacctcgtctttttttcccaagatccttcacagcatggtagtgctggggttcccaggggtgagagtggaagctcccagatgtcctgaagctaagctgggaagttctggatgatctctactgcattctattggctaaaacaagtcacagggccagcccagatttaaaaggttgggaaacagattccactgtttgatggcaygagctgtgaaaaattcatggagatatttaatctaccacactcccttatgtcccggtctctgcagtttaaagtgaacaatgtcctaaacttctgactcacctggaatcccttagagcttcgtttttctatttgactttggttctgggtcttaagaacccmagtttcacaaataaaaatacmagatggccgggcatggtgggcccatagtcccagctacttgaggctgaggcagaaggattgcttgagcccaggaggtgtaagctgagtgagctagaattgcaccactgcactccagcctgggcagctgagccagactctgtctcttgaagaaaaaaaaatgataacaataatgaaggttttaacataagtatagcccatgcaatatttgaaatatgattatactaaaaatgaaaacagcagaactcctcatctgagttgccccagggacatgaatgatgagtcctgtgccccagggacatgaatgatgagtcctgggatgatatcaccttaacacagtagcttttcactttctctacttcctctcttcccctgcgtccaaaaatagggcctttaaaagcaccgttcatccaagctcacaggccttggagtttctaaccccaaatatagatcagtacacacctactttgcctggcatcaattcatctggcacattagtctctgagggccttgatcaaaacctaacattccaatacaaatcagtttctcatcaccccgcattgactcttgcaaagactgagtcacacaataccactccgcccaaatggaaggacacaaargaattcagtcttttttaggggggtgggggtgcttatttttccagtgctttggttagatgttataaattaatcagcttaatatttatgctcacgagaagaaacacaatgttcacagtaatcatcctaacttcacttccaggcaaacaatttctgaggtctcagaaggcatcctatacctttcctgcctcaccaggatctctaatagcacaggaagaaagactgtggagatrggagagcacaatccatctcttttgtttgtaaagaaaatgttattatgatgttcagtccaaggatcaccgcatttttgatggatggcaatttttaacactttactactatagctgaatatggagacttaaatgcaattgattcttactgaaattagtttttatcaacattgatagacattgtcaatttcatttttgatgtctatcttatcttttttatttattcagaaatacggatgtaaaatcatttgatatagcctaattcacctcattccacaagagctaaacacttcagctcaactgtcgttttgttttttaatatctttagttgctgattcagtttatattaacctttgcattttattgaaaactatcatagcaaaaccattcctctcttttagatgatagaaactcctttaaattatagtgttcttgaagtcagagacaagtacacagaaaacattaccctttttcaatactgtaatcaccttcttaaggtgatctctcttgattgaaatactctctcctaacttagtaatgatgataactctggaatatcctgacctgacaaagaaatcagcctttccaagaggcctcagtaagtctgggatttagggatgtataccagactatggcattgtatttttaaattagcatcagatttgcagtaggtaagtctgatcagtttgaattcatgtaaatgaaaaaaaaaataacaaataaaaattttacactatgccgaagatcaagaaagacattcctcctggttattgaatattgcaaatctcttaaagcctttgttgtttatttacttattttttacaatttggtttatgtctgtcccatggtttcatatgacataaatctgaaaaattgttcaaagacttgactgtaaggatgcctttagtaatagcaattctgaaggattcacaggctctttgccaggtgcacagctgatgttgtttgtggctcttgagttgacacttcctttgcttcctgcagccttactcctgagcccctctcccctctgctctgccctcttcttcattggctctggtcaggagtgtgggccgccaccatcaagaggacacctgaacaagagtcctgagattagttattctcccagacacaacaagcagcaactgatttctcttctatgggctcttttaaagcaggctgggggctgtgccacatgagatctgcggtatgttctgaaagcgccatgggaggcttgaatttttttcggcttgcatcttcttcctttggatgtcttctctcatctatacagcatgctgctttcctttatgaaaaactggaatttggacatttagagagttgaaaagagactcggggaggaagagttaataattccacagagactgggagagagactaaggatgcagggattccagctgagattcctctcagtgcttcccgcttttcagctcctttcaaccatattttctgcccgctccctcccccctcgtttgcccctccaaccctccaagggacttttgtgttgtttctttccttcgccaccctgcacactctgctcttttgtttttattctccccacgcctaccccattgcctcctactggttttcctgatagaaatctcactcatgcatttcctttttgatttcaatgggttattttgtcttccctctttttctgtcttcagtctttcttttctctttttttaacccccctttttctgcctctggtcccagagagaactgaccaccatcctgctgggacaggatgacagtactgttagcattcccagtgccagctctccccacatctgtgcagcttttgtcctgtggcaggggaggatttggaatggtctgctggcagcgtcagggagactaatgggaaatgagggcccagagagaggccatgggaagtggaaggaatagcaaaggggatttggaggcattggtgtgggaagcaaattaaaggatgcatgtgacaaaaggcacgtcatatataatacaaatataatattgatgacaaagtcacatcagcgggagctggggtatccaacagaagagcctatggaatgagtactgggcagcaacattgtaatttggaaggcctggctgcttaacacgatgttcactttctcattttgaaagatttgtgaagttttgcttcctttcgcattccctgggtgtctcctgaatactgatgtgtatgtccacttaacagaattttctttcccttagctttcagaccatttcccatatagcacagtcttttgaatccatatttcaattgtgaatctttctcttaaagtgatattggctgggatccaaaatggctttaaaatgtcgtttattcattcattcattaaaacattttaattccgtcccaggcacttttgaggaaaaaaaagtttctgtaacaatcactgctaacctctttgttctaaatgttctaaatgcattatcatatttaatttttacaaccctatacagtargctctcatctccgtttgacaggtgttgaaaactgaagtatggtgaagttaggttccttgccaaaactcatccatacgtgagagatggtctgtgtcctccatattcctaataccagcaagggaaatgaaacatggataaataaccacaatgcagggtggcaccacgtgaatgtcgtaagcagagttcaaatgacaactgatctagggttctggaagagcagaggccgttttcatctgaaattttcatggagaaatctgcacccatatctcctcaatagggattttatagtattttttctggttcaggtcagccaaaggatgaagggtggacatttcagtaaaccctggaagagacagagacctgagatttccttttctattgaggaaacaacagtgaattctctgctgacaatttgatgatctccctcgaaattccttaggggagatggcatagtgtctgcaatcagaacgtatgtgtatataaaacaagccccaaactcaaatgttacccattcatatatgttgaaggaattcaattatctttatttttatttttttgagacagaatctcactctgtcacccaggctagagtgcagtcatggctcactgtaactttgatctcctgggctcaagcaatcttccctccttagcctccctagtagctgggactacaggcatgtaccaccacgcccagctaatttttttttttttgtagagttggggtcttgctatgttacccaggctgctcttgaattcctgggctcaaacagtcctcccacctggctgtcccaaagtgctgggattacagacgtgaaccaccgtgcctgactagtctttatttttttmtctcttgtttttctccttttgtctcgtttcctttattagtgagactcaaattaacttttcaaaaatcacaggtgttattgtttctacactaaaagtcacagggtacagttaaactccacattgtacagttaaagcatagctccccattgggcagtgcaggttcaaataaggagaagaacagccttgtcttaggcttctcctggcatccactctctgtaactccttccttgctagcattatgcaaacagttatcctaaagcaggccaaaaatgattagaaaatgtacctgtgcttttaaaaatagctgcccattcccatctgtagtcagctggctgctacttttgcctcttcttggccagtgttcagaacattctgctattttgtgattatctatgttgatgggagaataaggaaagttgaagttaattaaattgattatttcagagccattccccaaaccttttaatgggcattttttttttagatattaattatgagcaaaagtttcttgccttgttattagtgcctctgcctctcacctctgtcagctgcagaggatgaaagggcgtggagggaaggagagtgatgggtagccgcgggcatgcctgactcacagactggataatcagctctggaataattctgggtagtgactctggtcagaaattgtgaagaacagctttcttccttgtccccaccttcatattgtcaaattattgctgtgctagcycaattaaaagccttgaggatcccctcacttgcatagaggcttagaccctggataactgtggactcaccgtggcatggctctgagaacaccgaatgacagagctgaatgaaggagaaaagtaaacaaggcccctgttgcctaaatagttgtgcaattagcagtaccaatgggaacagagctactaatgagtgtaggctgctcatgttcatggaatttcttccaaaaggagtggcttagaatgttcactgaaggygacaggcactctttaagaggaccattgggtacttaagccccttgctgacgtgaagagtgccctgttggcagctaaataggcctcaggtgcttgtttctcaggacatagaatttgagtcaacaagtgtcttcacatgtaagtgggagtaaagtgaccctttcataccacattccttcactgatgatcccatatcttgatgtagtgtgacctgctgtatcaggacagagaataggacacttcatgctatctaaagttgaagcagtacctgtggtgtgccaggcactgttttaagcacactatgtgtattgactcttttctttctttctttttttttttttgagaagtcttgctctgtcacccaggctgtcacccaggcagtgagcacaatctcggctcactgcaacctctgcctcctggattcaagcgattttcctgcctcagcctcctgagtagatgggattacaggcacacaccaccacgctgggctaattattgtatttttagtagagacggggttccaccatgttggtcaggctggtctcgaattcctgacctcaaatgatccacccgccttggcctcccaaagtgctgggataacaggcgtgagccaccatgcccagccctcttgaactctcacaacaaccctgtgagataaatattattattaatttgactttacatgggtgataaacaaggagctgagagattaattagacttggccaagacctagtctatatagagctgggatttttaaccaagaagggacagctccagaaacctcgcccctggtcactgtcctgtgctgctctgcacttttgtatgtgtgtgggaggataaggatcattattcatgttttcatagaatcacaggaccaaggaacaaagaggtatgagttaaatctttgttgtttccttaatatagggtaggtgctagaaggatacaaaaaataactgaggtgttcttatattcaacaaatatagaataatttatttatggaaggcatgcattcaaaaagcaaatacatagtatgaggatagaaccaaataagtgctttgggagctgagagaaagaatacattccttctgtcaaaggtcatcttttgagaggaccttgtcacagactagcctttgaagaacatgtcagatttagataggtggctgttctggatagggagagctgggaaagcctgagaaatatgtggttgagtgtgcaattaccactttagcttttgtgaaaaaaaaaaaaatggaaccctgggaacaaattgaggaaatgtagttccagatgaaagactgtgagctccagtgtttaaatacttgcaagtaagcagtagatatgatgtattggaaacctagaaatctagatgatataagaccttcttatctttcttggtaactacttctgcatgctaataatgttccaggcagatactggttaggaagtctatttgtcaaataggacaagcagaaaagacaaataggagagacttkgcaagagaagattcacctggtcccagtgaatagcaggtgtgaaagagaagaggtcaagatgatttggatgaccaggagaattatgaaatcccataacatctctgttatgttgtccttggccaatgactttcatggtaagagtgataacctcttccaccccttcttactatgcacaataagttaatttttaataataatgatatccaccaataaagagagcaaatycccaggatcgtctttctaaagacaaaaatactcagtaccttgaactgtgtttggcacttacaagcatatttattcatccattcaatcaaatgtttaagcatctacttatctccaggctctacactagacaccaaggaatgacacaatgctagacaaagcatgggccaaaactttaaggggttttctggagtctagttatagggagagataaatcagtaggttattttaaaacggtttgttacgtgtcatgatcagtatcatgatcatatatccccccttgcctggggtggtcccaacttggatgataaatcccattacccattcaactataggaaatagggtcagtacataaagtgagggattgtataggcaggtgtttaataagctgcttgaagtgggatcatgaagggctttatggggaaaaaaagtctcattggatacccataggctgaagagggcaagagatggcagggagagaagcagtggtacagagctagaaaggaagacattccaagcagtgtttgtagattgaatggattaattcatgaatrcacaaaacattgtgaaagggaaaattcacagaatatttccattcctaaggatgcatctatagtcatttgatgtatatgcatagtatttctttctggtctgagaagggaaattttataaaaactggaattgtaccctagatgatacgtatagtatcttacagccttaatattttgcttcataagacgccatcccaagcaactcgtttgagaatgagaaattgccctgattcctaaagcccacctaatcttcccctttctccctwgttagccacttaattatttttcagttattctattccagttttatttcataaacttgatcgaaagctgcttgacagcagagaccataccattcttttttatctaccattctgtacatattggttcatggagattgggagtttggtgatgaggaggtagaggaatccttttatttttctttctgtcttattattcctatccccaaatttagctttccaaggcattttaattctgtgactatagattttctgttaatgtttagtttttgagcttatttttgacggtcatcttgctttcttcttatttaggaccttccgagttattggatatggcagacagtgaaacgtgagtgttgccttttattacatagtctaggttattttcttcagaacatatctgggagaagaatgtaatctatagagcatatcntaggtaattttaacttaattaattcaaagtccactttcaactttgttcataaatgtgcarggctaatagcctaaataaaaaattacggaatagaaattgatgacaattgtcataatgcttgcctccatagtcagcgctaatcatcatttagagcttgcttcaaacaatgtacttctgcactggtgcatcttggaatgttgagaagtctaaataattacacttaccttttaatatacccatcacatttattctttctcaactggagtttctgaaaaaatggggccctactgccctaaggcattattcacatgtagtgacataacttctctctgttagtctagaacaggacaagttatgaaccaccactgaagaactgagaacatagtcactctattttctgtcttctgtggttcagagaagggatcctgattgaaaaagtcatcagctctgggatggtgcctaaactgatgataatgtttgttttcaaccttatttctaaagtagcgaaatagcyactgctccccaaacaggaacaaagataggctgtacaactaatcctgaaagccatatttgaaaaggtataaagatgagttggtgtggagaggaatgaggtggtgagtagctaagcatgtgggaaggaggagaagtagaaatgaatagaatggaggacgaagagaagcagtagagctgtggaagaagctgtctatcactccatagagctggtccacatgccagcacatcctattggcaagattataagtggtgccatcacttaccccattttgccttctctaaaggctgctattgatttttccygaaacactttggcgttaagcatcttggtgcctttgggctcaggataggaataccctcctccctatagagcctgtcagtgatggggaaatggccagtttcccttgctccttcccacactgagtggctggcctcaagcctgctgcctcctggggagagccctggctctcaaactctcccagggtctcactgtgcctctcagatatcctctrtggctgccccctccttccacctgccactcacacagaatctaaagtggatagagcagagtgggtgttggcctggttctttgaacttgggttctcaggagatactccactgcaggccgagtggccatcaaccaagggctgcgtgctgtgcctgaagggccagaggcgctccacactgctccctgttctttcacccagtgcctttctcgctctgctcaaatgtatgcacagaagagaatggcttcagtattcagatacatctagacaattagtctgtttaatactgcattgactatcacctaaatyaaatagtagtagcttttaaaaaaattactaaacttaatcaacactatttggaaagggggctagagtcagatattatgatcagttgatggctagctcaaggaatttttagaaatccccttccctacctccccagaatgtaccctacagccaaagtctcagcagcctacagggaaggaggctgaggagcaccctacatcagctcccctcacccattccctgctgcctccaacccctttatgggtggtttcccatttcatctttgatttaggggtgagactgcactgcacaaggctgcctgccagcggaaccgggctgtgtgccagcttctggtggatgcaggagcatctctgagaaagacggactccaaggtaactcgatgagtgagtgcaaacatcctcccgctgggcgagatcgcaggcgctgttgcctttgcttgtgaccatagcacggacatcctttctgtgcttmtggaagtgcctggggctttggaaaaaggaggaaaaaatagagtgcttcatttagagaaactgtgatttaaatgtataagcacaaagggagggcgtgtgcttgcctatggggcyttataaacctctgaacacgttgaccttgggactttggggttgtcctgctgagcgctagcagccaagtcatgggagttgaggtccraagcccaaggagaggggtcaggaccattttcaaagactttggcctgactactgagaagcccctttggggttttccttcagtacttactccaacgtgttttaaattctatgatttatatggccccttatatgggtgccaaagggattctttcccagctcccaggatggtaggatctggctttgagatggtcatagtcttaaatctggtgtgtttatgtagttcttcatttttaaaaaattctttccatttgttttctaatattattctctaaaagttaacctcaggtactagatagcatgggaattactgtcatttataggtataggagctaaaagcctagagaaagttacacatacccttggaccagtagctgaggcttaaattaaattgagctcttttgacgtccagcccagtgttgtatcagcaggttggtggttctcatttggtgccagaacaccccagccacataacaaaatcggtttgtttatggrgtctgttttgttgaggtacagtgatacctgtggcacttggcttgaaatgtggttggtttctccacagcaaaagttatgtaaatctgaacttaaagtgtccactttcttaggactatcttaataagagggcagtgaggccagatattgtactgtgacatgtatgccaaccttgatagcatcagctggcggaggtgaggccttaggggaaactctgtttaggagaactgagaacaagctgcaccacgagttgtttaagtttatagagagcacscaagagaaagggttgaaagatagagggaaggaggagttgtagcttagtagagttgamccagggctcagcctataagaaagaagagagagaaagaggagttagtttacatagragatcaacaccatagagcaggggtgtccaatcttttggcttccctgggccacattggacgaagaagaattgtcttgggccacacatgaaatacactaacactaacaatagctgatgaactgaaaaaataaaaatcacacacacacacaaatcttacgatgttttaagaaagtttacgaatttccrttgagcctcattcgcatccatcctgggtcgcatatggcttgcgggctgtgggttggacaagcttgccatagaggattctgataagctctgagagttttagaacactctcggtagactccaggaaagaatgaaccacttacctatagacacttacagagaagaatcttgatatatagttgaggccttcattaagcaggtaccgagtagctcaggtttkgggccaatggttgtaaccatgacacatacatagattacttagaagcctaattaatggcttaagctccattagatttatttaagtgataagaatctgcctatgtgcaatttttttccctggggcctcctcaaactgcagtccactttatgaaataactttgccttcctagtggactttctttcctttctgagccagttgtattacatagaactctccactttcctggcaacccatgagcacccttgctctctgaagtccctggctgcctaggtatatcaaacacacttgagctgtgtcctggtttctagtggtctgttacctgtctggctagctaattgggtacactatttcaaatggcagataattaggttggtgtaaaagtaattgtggtttttgccattaaaagtaataatttctcaatgtgatgttcttcccagatgttatttgcactcagatgttttgatgtttagcctgattgagaaacacacaacttatattcaggattaatggagccaggttatggggtagggttggtcttgccagggccactcagaccacagcagcacaactgcctctttascacacaaaggctggtcctacactcaactcagatcattttaaaaacagrgagaagccatgaaaaagagggacaaaccaaacaggaatcaggagacctggctcttgagcaggtctgcttttttatctttctaagtttctgaatcagataaargactcaatgttcatggaaacttctttctgttttgtgttgtgtatgtgtctgctttttttaaaaaaaaaatggaaatagcttgtttttataattataaacccctcacatagaaaactagtaatgtaggaagatatgctccaaaaagcaaaaaattgctggaaacctcacaacctagacctagatatcattaaacttgtaatgatcccccttcacatgtagatatgcctgtttttctctcttgttgtttttaactagatgaagtcatacatacatgatatcgtataacttttcactcaacgttatattctagaggtcttaccacatgaaataatatagctatacttcattactttttaaggatttttaaattttgccattctgtaacttgatgctagtttaaagttgaatgtgatcattacaactgaatcttctcctggaattttttggagagaagcagcatcctgagaatttctcctattagagwtcagttcctcagaaatcacctcaaaggcccacctcagcaacctctctgaatatttggaacctggaaattccaacctcattattatggaagtaaagacacaattatctactaaggctgcaaacaagttgaataaaaattattcaaggaacttcaaactagtggttaacggctaaatcccaagtgaataagtaacattttagaaagattctagagccattgttacttcccttttgtcctctccccagtaggctatgtagagcaggttggattgaggtcgccagtatctgttgggatagccgagatgaaagctgagaagtctctgataatatttataacacttgtgtgcatttgtacatggagctatttatttggtacaatgatcatgcctctacccttcctttggaacttaacataactttttaaatagttaaaactttatcattcaacaaaaatkagaaattttgagcgatgccaagtaatatatacaggcattcaaaagaatggacactctttctccctttactgctgacttcttattcagtggcctcatttaaaaaatagcaatatatatatacaaatatatgtgtatatgtgtgtatataagtgtacaaaaggcattatagtagtctgtaagaaattatatgatcatttaamatgttgatgtaaaaaattaatgacaaatttatgatatattactaagaaaggttgtaaaacagtatgtaaatgaattgtggttttgtttttataaaaatacgtatagaggcatataaaagacaaaatctagttatcaatggaaggttagtagtggttatcttagtttggtggaatgattagggatattcctyttcttctttgtgcttttcaagctttccaagatttctttaatcaatatctaccacttttgtattgagaaactagcttagtttttagagagatgaaatagcccaagtctgaaaccaataaagaaaacctttcaatttttttatgactatcccttccttttagtttctgtatgttgatttcccaagtttagaataatagaaagagtcctaaactagaaatctaaatgcctgcctccctattttttaaattcagtaatttctacctccccatcttccagaaaggctctgggtttcaaaactcgctttaccccactgtttccttctgtatactgttaacctctgtgaacttctgtttccctagtataaaccccacccgtcaaaagtgataaactctttccctttcatttaccaatcgcacatgttcaatttaatgctcatataagacaatagatttgaaagtgtcttgtaaactctaaaacaccaaatgtgaaaggatccttactagcaggtatccttgcgtagttctgtttctgtgatttttgttttgttttgttttttgtttttgtatttcacgactagcgcttgtgtctatctctctctctctttttttttttctcactattttcgtatagggtaagacacctcaagaaagagcacagcaggctggggacccagacttggctgcttacctagaaagccgtcagaactataaggtcattggccatgaggacctggaaactgctgtttgaccctggtattcgggcaaagaggacatgagcaagcgtatcacatctgccctccctgcaattgggcagctcccctggaagaagctgatggaattcatatatctgtctctctcctgcaagawtctacctgagaccatgccactagcttttaagggctaccaagatgtacaacagaacatgatagcccattgagaaggaggcaggatacctggagatttgtggaatacagtacgagttccacaaaatttgatccttattgcttccagcaagtagcatgaacttctgtgttcacctgtataatttattttaaagattcaaaggatgttcgtataaatggcactgctccatcctccccctatgcattggtttttttccctgtaccatacaattctactgtaactacccatcaacttaaagaaaaatattatctcttctctttacattcagtcttggaagaccacaagattgtctgaaggccttctaaaaccttctgaatgtcctgcagaaatataactgtaaaaccacttccatttctaagactaaatatatcaagactatttagtgactctctctgcatgtccccctcacccgccaaccctccgtttcattatataggagctgggaagtgccacatggataatgtcaacttgtgtgctatatctctgaggaatggtgaggtggcatgggagatgtctgtgcttggaggtacctcagagaggtaacccaggggtcagcccaggctgctgggctgtagccaatagccatgcaggactggttcagcttgggctgtctgtacagctccgtactgcctatgtgtagccatctttgccttttgctgcaatagaagatgagcaaaggattaaacagaggcccacagctagtttgcagaaccactcaattttaagtgctgtttaaattgcagagcaaataatcctgtgtgggaactgtggttacaggaaatggagcactctaacaatgtttacttctaaactttgttgaatgataatagaaagcaccctaattgacttggaaaaaaaaaacagcaaaagcaaaagtagcaacatatgtcaacatatgtcactgaaataggaaacagtcattggaatgttgcacagaggctaatarctatrgactgttggatacagtggtgagaggagccccattttaggtctttcttttaggtttttggttttcattactccaagtaryccttgacccaagaacaaaggcttgttgtatgagttccactgccagatttatgggatgcctggatcattcagaaggatgcttcaactattatttgtcaggtccaaaggtcgtacttrataaccccattttctatgtatggggtagtctaatatattattttatctactttatttttcccttttcagaaagtccttagtgcaaaccaccattggaatctagccagaaatgtctgtcagatagttagaattgtaacatctaaacctgccacggatcgaatggtacttacaggtacctctcttagggactctgtgatccctaaaatatcagaagaaaatgtctgtctttctgtccaaatatctacttgacttgggggtaagtcaaaaataaaagtaggtgtccaaggattttacttttggcgaaatctgacgtctcctgagcttattttcattttgtccttggacatagcatagtgcttccctaatgtttctacatatgaccatgaatgatagtgtctctacatttaatttaaaagtctaatggtgacattttgcttatctgagtcacatttcggtaacatatcatcattttgaaagtgcggctatgacgtgctatattaaacaggaacagcctttcagtggatggggattttattaccacagtctttccatagtcatttcaaaatcaaattgttggtgggaggatggattgggttgtgagtaatctacttccatatatcagcctcagaaatggaactatcctttggatattacaggagacactgcagcagattgtttccagaagctggaaaaatatgctccaggagaatttaatcactgggcttttgctgggggatttttagttggcgggactgtcaaggaaatgtgatgacagaaatataatccttaacacaaactggaatctggctttgaatggcatcttccattccctggattgagtcaaatgtttggccaagcagtcagttatctagctgttactgttgggatgaagaactctgttttcatcaactaccatctcacatttctctaaatacttccaagtagcccagagaaaatttagggtacaggtggctatgggccaatttctaaatagctccaattgaagacataaatctgtgttatgaaaaatgatgagttggtactgtaagattcctgatgcatttggaaattttttcaaaccaaaaaaaaaaaaggcattagagtcctgtgttattcatggagaccaatatttgatatatcgctttgaaaaaagcaagtaccactaggacttgggatttccaaaataaagtgagcagaataaccacatgtttaatggcttcaacattaaaccacctcctgtagcatgttttaaaaattggtcctgggctttggaaagagctaaggccttatggtctaggagtttccatctcagcttaagtatattgtatccctactattaggacatcaggaaagcaagtgatctagtcctggtctgaagagccatgtaactttaacagacataaaaatatgtacctatagaaatatcatttctacaaagcctactgagacagcactgaagaggcagctagcttggctgactcctctgtgtttgtttctttgtgtcatggcactgactgctttgagattccatttttagatgtggttgatagaggaatggaaaatgaagagttattaaaagacaacattctgtaacctgaaaggtagtcatttttgcaagcttatattttaatattgtgcatttaacaaaatagaacacagttaaactgtgctttatcgtattcaaggacttcataaagaataagagagaagattagtaagccaagaatggaataaataccatgactaggaattttgctttcagagcttatgtttcctctgtagatgtgataaccaaaaaccagtgcaagttttgaaacataatttagctggcaaatgcacagtgatggaaattagtaatgactgatggagagccgtacatacctgttgctccttatcctttcagaatggctgctttggcagatctgcctgtgctgggagctactcaacatcacttcattttcatctggacctagtgagagtccctttgcctaacgaatttctgaaatttatttatttactagaccccttataatattcatggctttaaaaaatgacacagcatctttattttattacatgtcaattttattaataatatttaggggtttttttaaattataaaaatggcacatgctttttataaaatgttttaataccacagatgagtatcacatccacagtcaaggcatccctttgttctggtgttgtgtcccacttcccaaaaataaatacggttaacactgatgaacactgttgcttgtatgtgatgtcagaaataccccatccgttcatgcacaagtatgtatgtatatacgcatatacatttacacacatatatagacatttatttatatacacatgcaagtatgtatactatattcatgtatattgcataggtttagaaaagagcaaacattttaaaagcatgctgatcatttgtatatgtctagtgaacaccagtaggcaaagacaggttaaacagagaagttccatttatttttttgtttccaccattgctaggcttagatctgttatggcattactacaattgcacttagcattttctattacctgtgtcataaaattcatgaccaagagttcctgtaattgtttatgttgccttccatgaagcatgaaacctaccatagccccaagacttatctatgctatgtttgtatttcaagtaaaggagagttctttcctctgtgatgcttacaccactttacaaggctgtttgtaacactaacactcagtaggttgcctagtgatatttaattagggcaggctacttccgggaaggtgtaacttcagtgtagtatgggggtctgagcagcttgtcttccttccagaaggagtagctaatgaaatcactgagaacagcatattttattcaattatgctatttaaaaatgggactttgttaaaatggctcatcataaccatcaaataaaactactaattgttctatttaaatgaattatattcattttaggaaaagaagtagaaaaacatctaataaattagctttctgattaatctttaacacttatttaatataaaatggcttctgcctgcatcttaattgaaccacctttgaatctctcaactcctttcactctgaatctcatactcagctgattagaagtcctacaggtccttctctgccaggtctgtcagatcgacttggaccctacccttttctgtgtccccagtcatccattatctcttgtctctctaagttttgggccatagcggcagtcctgtccctgaactttctgcctactactgtcaataattttgtcacgcagttgcaaaamtcttccccagatattatgctcaaaatacatcaaaatgaaattaccctctgggacaagtataccttttactcaaaggacacatggatgtccactgaccttgatcatcttatagaattatggcaagcatgattctgaaaatctatcaggtttagcaaatatctgtcttagtcccatgagggtacacaatcacggctgctgcttcctcattcaacaatgtaagccacatgcctctttgacggcacctggaggactaggttatagattttacactgctgagggccatctttggttttacactgtctcctcacagcttaatgagaaacctgaaaataagaaccaagaaaagagtcatgcccttggacaacctcctctcccaggacactgagatttactgaccaggtcccagaaagaaagcagaaaaataattcttaggctcttgtagcatggattttaaaatagaaacgtgaaaattgaatggtatcttcataatgcatagactccagagtctatttacatatgtattcagttatgcatgtaatcatatgtccatgaatcaatcataagtgcatgtatttaatcattatttgaaaaatatttgtcactctgaggcaggcatcatactaaggatataacaatgaatgtaatagacaaaactcttgatttcatgaagctggcatctagaagaaaagacaaattccaatgtgataagtgcagtgcaggagaaccccagggtgtccagcatgggctggaaattcaaccaaggctttattgtaccagccactcattagccagcaatgttttggttcaatgaaaacataagtaggaagagaataatattttgcatttccattttactggagtcatagtagatttctaaaaatgtatctgaaactaagattttaaaacaagacttagaaacactattaaaatgaaagctaagactgatttattctagctctcaggatagaactaggaaaaataagcagagttttcagtgggttttgactaaatataaagaagatgaagtacaaataatatgtaatagtggagtggatatcacagttataaactttcagcctctgttagcatttaaacagaggatacctgaccactctgaggggtgttgtgattaggaatatgtgatttgagggggctaaaattagatgctgtgatttttcaaaagatattttttaatggctttgttgaatggcaggattttattttaaaaactcatgaaaatcttgatttttgatttgttaatctttgctttataactgagaattttaaaaatatctaggggaatggccgttagttatcatttaaaaaattttaaactaagcatgaatttaagagctagtcaaaagaaaacatactaaaaggtgtaatttaattaaaaatacttctggaagcttataaattttgatcagtattcttagtcattgtcaagtaaaattctattagaaatctgtcttactgtccatccaatataaaaaagtgctgtggtttgatattctaagagttaagtgtaatctagtataaccacagaagaaaattctgcctgtaaggtatttgggagccaagtaaatgtacatgaaaggcaatcatggaaaactctttggcttctgccaccagcgtggcaaccacaagggaggtcctacccatggaaataagaaaatagtgatccaagttttcacccaacttttgaaatttcaatattttgagccaaatgccttctgaaatgggaggctttgatagtgggaaatactgaaattatcttttccctcagacctttagtgaaacacacatatagttttcactctatgacagtataaacaactcaaatctatactgtttgttaagaacagtttcaagaattaaaaagtgctttagcgttatgatgtattgacatgtttgagcttcagttggggttcaaaacaaccccaacgaggtgaataatgcatataatacattttagatgaatgcactgaatctcagagcagtgaattcagcctgtgcagattcatatagcaaatgatagtgctgcagccagaactgggtctttagaaattacatattaacatgttttctaagtaagtcattttccatcattgccttcaaggatgttttatatcaattgttcagatttccataatatagaagatgcctccatgaaaaaaaaaaaatgtttacctaagtttccacggaaagaatgagttagaaataagggagaatgtgaaatcaaaaagtcagagtttttgctgtcggagagaggcttgtcagcttgtacatagttcaagcaaagaaaagtctaatgtttgcataccagggtggatttcaagagaagaaattaacagtgagcgttaatggcttctttaacttatttgtgattctcagcatttaaaaaatgttagtcctatttttcttcctttgaagtcactattaggatgatataatttctgaatgctgcaacaaaaaatgttaaaaatggccctgacatccaagactctattgctctaagtttatgggtgggtatgcaagctaagtgttatgataatacatagtcatatacatagaggtttaatacacctatgggaaattccggcatatttgaagtagagaaaaacaaacaggcttgaaatgtccttcagttcagaatctcatactttacaagggacatttatgggcagattggtgaatatgtagaaggaggatgtttgatctggaaagaagacaaaattggattaggaataagaatatgtagaggagttaggttaagtaggactgttagtttcaaattctgcagggaagatgatttgtagaataaaataaggaaagaaaagagcagtaacacatgaaaaggagttagctttattacttataaggatttatttttcctaaacattgcatccagaaaaacagtttgggctttctgaaaaacagw

SEQ ID NO: 94248 - DNA, 19897 bp, Homo sapiens
agtcgcaccgaatgacatcactgcccacaaggtacctggcctcacttcctatcttactagctgtcttttctctcgctgtggccacagcagcaggtggacagggctgggacagggggtgtactgggtttctgagccctctcaaagtctgtcttcagtcccctctcttctttcctctggtcctagcctgcctctgctcctgtatgtactagtggggtattgggtgcagagggcgagaggttgggcagaggtcaggagaggcctctgaactccaagggctgtgtacataggaggtaagttggagcccaacaaggaaggcagccagcaacacagcccaggtctgaccagtcacttccctccaatgaagacaagactaatagagtatgcaaataaaagaccaaagatcatgtgcttacagcctgtgtggggtatagaggcaaaggtgatggaggtaggtctcagcggctttcccagctttgaaataaaaaaatgggcccaagtagaatgtcaagctccaacccagaaaccaagattcacatcagaaatgcaaggttcccaaggacaaaaacacaaacacaaagtccctactggggaatgcagtgttttgagctggcaattagaggcccaaactggacatggaaggtccactacttctctgcttccccgacccaaaatggcattgcatcccttgtcttctctggattctgctgccttccttgccacagggcctctcccacctgaaatgtgctgcctggagcactcttgaagagatgggcactatccgatcatctttctactctctccagccaagggctaaataaataggagtaaactgacacctttggaagagtgcagccattgcctggggctggaggtgggggaatggtaagctctgcccacatggctgttagccaccatcagatgccctaaggagaatgacactggcatcatgaactgatagaaaatttcactaaagttcctcatgccaagctattaggatggagatttaggagggtggaggctgcagcagggaacagagagcaatggcctcaaagtaggacaagtccataggccagagtcatccagcccagatgactcactctcacctgccctctcccgctcccctgacccgttgttttgaggcttttatgtgtataactcatagaactgcacagcttgcctcgaagatgcacaagtgtcctcttacttcactcttttgcaaccttcccacccccaatgaacctccaacgattggctatgaagaagctcaactttcttccactgagctgggctacacaagggcaatctcttggggacagaaatttccaatccctgccctcaaatgctctcagttccactttgccttttaagaagttccctaaaatacatttgcaagccgtagtctacacaagggtcagattccctccagttgttgtgtataaatcataccaaatttttaatacattccagagcccacctatctaaatgaatcaactgagatagcagatcatgatggttaagagcaataggctctggagcaatatttcttgagtggaatcctacctctgccccttgttggctatgaggcaatgagcagaagactaaacttttcagtgcttcagttttcttatctggaacatgggaatgataggagtacctaccctccttaggactgttgaagattcaatgtgttaaaaaatgtaaagcaatctgtgaaatgttaaaaatatattatctaacactgttactccctttgggaggtaaatgatcagacacctccttgactaatctgaaacttctaatataatgctgaccatacagaaaactctcagttaaggaaacttacaatattatgggaaagggttaacatttataatacacaaagagctcctgcaaatcaattagaaggatgaatttggttttactcttttgattttgtgtaaagacttgcaagatcatttcatctcaccctctcaggtaagaaaactgaggtctagaaatattttcctaaggtcatgtagtaaatcagtggccaagtcaggaatagaacactagggacctaatttctcccaggccagggcttttctttaattaatcaaacaagcctgatctaagaatgtggtcttacaggttagctcagaacctctagagtctcagaactagactttgtaagagatacaactcttttaattctaataaatttcctaactggtataaatctgttaatattaataatcttaattataaccctttccctgtatgttttccattgcccacaaagcaacaacatattccttatcttatttgatccttgcaaacatccttgttagccttacagggaaactgaggtctggggaggggaagtggcatgttcaaggtaatctagctggtcacatgaacatctcttttatgtttacaattttgtcctcatggccctgccaacaggcagaaggataattttagcagcaggaaatctgagataagaagctggcaggcttttgacaaagtcttaaagggtaaacctggggtccaggcttgaaagcctaacttaaaattgcctggaattagctatgagattcctcactactgttaccaattctgatcccagaagcaggagaccaaaacaagctttatggaaagacctcagcttggcactcaagacttttcaatcaagcttcagcctatctgtccagccatatctctccttagatcatccttaaactgcactggctgactcactgggccccaaaatacatggtgtattttcctgttttttggcctttgctcagcctgaaatgccattttcctccttctattcccaacaaaatctgatccacttttcaaggtctggtttgatgttcacttcctctgggaagtgacccctgtatccttgggacaggccttgtatttggttcttatattgcccacatgctcctatctgagcaagtatccaccagtattttcctggtctgcttccccactagactgtgaactccttgagtatggagactagatctcagtgatctgtaatttgtgtttccagtgtccaactcaggccctggcacagaggacagagaagacacttgcttattgtgtttgtgcagtctacatctctctgccctagatgagatgaacttgtggacaactaatcctagttcaacaaggtaaatattataacagagagctgtgcagggaattggatgggagaactaatttgtctgaggtaggaggtggcatccagaaaggtttctctaccttgaatgggacagaaacagataaaagaatgaagtcctctctgaaaagggccaatgaactcgtggcagagaaagggttcagtcagtaccagattctcattcaagatcaagctctgacctgcagctcttggtctaaaattctaaaatggggctatctctagggaagaaaagattacaatgtgatttcccaaggcccccagatcctgaccccatacccctcccaaagtatagggcatgtgtatcgggggagaataccatgtaaagcagcatatgacagtgctgatggataataaagtcacgaatggggtctccctattggtagctctcagactgtttgggtatgaatgcatttgtggagagtgaaggtgtgaggggagatcgaccacacacttacaagctaggtgcatgtatatgagtgtcaggccttctgtgacagcagcctaggatccccttccttctcacccactgtcctggcccaccatctctccactattttcggcctcatgcctgggccccaaacctcactgaatcctagtcatggaagtggctctccacagactatagtcgcacagcagctggagggttttgggtgggattgcttgtggagcctatagaaaaagcaagatgactactcttagagcgaggaagtcctgaaatgtctccaaagagctttggtttctgcctttccactcttcttgatcgtgacagccctctgaggaacgttggctagagactttgatttccattttactgaggaagctactgatgcccagagaagcaagagagcttgttcaaagcgccacagcaaatcaaccctactttacacatcagtggggaggtaagagctataatctcaatcactcagttcattcaaaaccagacttgaccaagttagagagactttcacaggtgctagtgaattgccctgggggccagtgtcccataaaggccagaatggacttttaaaaatatacagacagataaataggttacatatagatataatcttttcccccactttcccatgccctttaatgcacacgacaaccaaccatctatgcaaagaaaactttccagagggcctgaagaatggatgtggatttgtgcaactcctgcctactttcccttctttctcacctaccttttattctagaggttttttcttccatcgctaattatccaacactcggttctcttgcatttacagacccccaaggcaggtccagtgggtggcatcaaagaggaagcctggaggtgttcgttggttccctgagaaggctgaggacgtacccttgttaagtgggggatgtatgtgctctgttgaaatatcagctgttgtagttgccaaagacgttcctgagccaccagaagccttttctcttcagtccaaccatgtgttcaccttgccccaaaggtcagaactaatattaacaagccactgcagaatggggaaattaaaaccagccatggagacaggcaagttctggatttcgctggtgctgagtttcagatcgatcttcagtgtaaatgggcataatcccttactggaaagcaatctggcaatatgaagcaagagcaataaaaatgttcatttcctttgtcctagttatcgcactcatgggagtcaatcctgagtcaataactcccaaagcatgaagaagctcaggacatgcaaatttttattttaatcacagagctattttctgatagcaacaactggtaaccttttaagtcctccaggaggaaaagcagtttactgcgtctttgctgtaaccattgaggatgatggctctaagacttaaattctggggaacaaataattatgctgcaattctgggtgaggaacctaaagatgcatcgttatgcttttccctggacattgggcatatccattacttctaatttttgtgctctcaaaaacaagccatgaacctgtcgatgctcttgctattatcctttgttcattcattcacctgacaaatatctattgcttcccaacatatgctgtgtccagtattaggggatggggctaacaagatgaaccagacatggtcattgctctcaagttgctggcattctaatggcagcagaaatagaagtcaatgatagctgtgtattataagtactgtgacagaatggaccatagggtgccgtggggccccagaggaaaagacttaactggggaggtgtgtggtcagtaaaaacactcagaaaagtaattattgagctaattaagacagggtgtgaatcctggctctactacttcagtgtaagagagagtgaactgtgagaatgaaatgaattcattcgacgtctctaacttagcctccatgtcccgaactgggttgtcttgagaatgaaatgagataacatatacagaagagccatggatgcatccggagacaatgctgctcacgagcttacatttcctgggcttcgatttcacttatctgagaaacagaaccaagagtaaggatgtgtccggctacatccttcagaatgttaagagccaagacaaaagctacagggcaggcttgagacagcctcctcctcctcccctctgccccaataaagccaaaggccctcctcctaagtcttatctcagtggagcgactcttactgctccctcctccaaccatgaacttccctttgcccagtccaacgcgagcacttagcgccagctattcctggggcgcaagcgctgcagccatctgtgaacttaggtgggcggtccgccgcactgagggcggggctttggcagctgagcagttccgctcagggttccgtcgcttaaaaagtggcaaaatgccgtttgtaagtaaccggacgcaccacttggacttctgagtagaggaaaaacgcattgagactcagctgtccgagcggaaggagcgggagcccaactggaaactcctctcgccattcattgcccctaggcttccgctttgcttccttcagcgtccacccagttcctcctcccgccaatgagagctgaggaagttgaagcccccgcccgacgtgcgtcaggcgctttagtggtacgcacgagaacgcctgcgcaaacgcgcgcgggaggcgggcctggccaacttctgaacaggaagcagttcgctcgcgcctaggttggcgcgggctgggaggtgttccarccctttaagatgttgcgcgtggtgagctggaacatcaatgggattcggagacccctgcaaggggtggcaaatcaggaacccagcaactgtgccgccgtggmcgtggggcgcattttggacgagctggatgcggatatcgtctgtctccaggaaaccaaagtgamcagtgagcgctctggattccaggatccctacatactttttctttcccgctaacttttgtcccctgtcccatgtaattttactttcccagtttcctattcttagagtcctgtccttagacccaggtcccttccctcttaaacttccatttcccaccctagctagatcccctaattgcactccatctcctgtcttcagcaaactttagctccttctcgaaaccccatatctagtcagattcccactcattctccggccccaaactcagtcccctgaatttcctccttccatacgctgtccatctccccgccgccaagtcaaacccccgaattcttcatccctgccccaagctcagatcctctaattcccaccccatctttgaccccagctcagtctaatttcctctttttcacatttccacctcagaaccccagtaccccttatctattcccatctctcctcccagcggaaagtccctaattcccacctcatttcccaccccaagcttagatgtcctcttatttcttcaccctcttatctcccctcagaatcccctaattccttttccctccacccccagttcagatcccctaattccctctctcttacctctcacccttagctcagattcccaccatcctctcgtatgtccatccccatccccagcttcctcctatcgttcagacccccaggcttagctctgattctttccccttcccacctaattctccacctccacttcatagtctctaaccgccccccaccaagccttctaattctgatatcaatttcctctctgacatttcccatctttctaggtcctcctctaatcatggatatttcattcccgtcacccccaactctggctctgatgtgtgcaaggaattagcctacaactgtaattccaggcctttgtgtttctcggatgctagttttacctctgacttaatcttacattttttttttccaggggatgcactgacagagcccctggctatcgttgagggttataactcctatttcagcttcagccgcaaccgtagcggctattctggtaaatggggctttctgtggactttaaattagtgagggaggcagataggggaaaagggtttccaatatttgatgagagggtaataagaaatcttagacatttagtttacagagctaaagctgcataatagtaaattacatgaaatataatttttatggatagaattatcctactggacctcagaagtacagtagtagtgtggtgcttaattgtgtgaactgtggagccagacagcctgggtttgaatcatggctcatttcctagctgtgcaccctctggcaagttacattacctcttggtgcctcaggttcctcagctagaaaatgaggataatgtttaccttccggggctgttacaaggattaaatgaattaatccatgtgataataataattgctaatacgtcttgagcactcaccatgtatcaatgtaaaacacttagaacattctgtggcttttttagatgtaggaactgagactccagggtttgaataaggttgcccaagaaccacactttatgaagatgacttagatgacttgtgtggggacaattggagtgggacaggctgtgcaacaggctattgactgccaggtctgctcagagtgccctgtctgttcccaggtgtagccaccttctgtaaggacaatgctaccccagtggctgctgaagaaggcctgagtggcctgtttgccacccagaatggggatgttggttgctatggaaacatggatgagtttacccaagaggaactccgggctctggatagtgagggcagggccctcctcacrcagcataagatcyggtaatagctcatatctccctgctactgagcactgctggtgctactctttgagtgtgaagattctaaggcttgccatgtaaacatacatgcaccgtggagaagttcccaaatttgcctttcctggtttagtcctggctgggctactcagtgtgtgaccctggcaaatttttcccccctctgaagcttgagtttccatctctacaatgtggggctggcctagtgatccagctcttattaccatagacatctcaaaagcaacttagtgctgaactcagtgccccaggttgctgtctttctgggtgttctgtgtgaatagcagcaccattacctggtggtaatccttagatatccctctccctgccttatcagtagtcagtccccaagtcctgtgcatgccagatcatttgtgtctctttaacccctttcttttccatcccagacagtcacaaaatggaagccatgtggtatggggaagggacagaaggggaggtttgaaactgaccccttttgggggtttctcttttctccagcacatgggaaggtaaggagaagaccttgaccctaatcaacgtgtactgcccccatgcggaccctgggaggcctgagcggctagtctttaagatgcgcttctatcgtttgctgcaaatccgagcagaagccctcctggcggcaggcaggtactgcaagcctgggcagtaaggcttccttgagttggtcctgggtgcccagccctgtgtcaagctccattgaaagggatatggaccctttgtctctgagttctttcacagcatagttgcaaacaccaatatgcccacctgaataggctctgctcaaaacaaacatgggttttgtactctgagcacctattcaggctcctgctcttactcattgtgagccctagggctagtcttgcctctgttttctcttttgtcaaatgaatatatgaatctctaccctacacaatagttttaagggtaaaatgagatgagaatggtaaagtgcgtgggagcaaaggaaagtcttgttccagcggaggacaggaaagtgagggtgggttagagcaatcaaggggaggtggtatctgagctcagctttgaaggacaagaaaaatgcccattggctcctgattagtgaggcagtcatgtcaaacatggaacactgtcacctttggagatcagaattgggttggtcagatatgaaaggcagcaagtttgtggtaagattggagaggtaggctgttatgagttgctgttggctaggaagcctcaatatgggagagggcctgtctgagctcttgggcccaggaaaaagtatatgggccaggactgctgcacccctttctaacaatcccacattgtgtttttcagccatgtgatcattctgggtgacctgaatacagcccaccgccccattgaccactgggatgcagtcaacctggtaaggctccctctaggtgcctggccccactcctgactgattctgtttgtccagccaaccaaccctgagtttttggcccagggacagcttcctttatgggaaagcggagcttggcttgcaatactattcttatagtactgaggattggtcattcattcartagacaatactgactctgcccatggcctggccctgagccacatactgaggactcaggagtcagatccagcccttggctcctaggagctctccagcatggtggtgggctacagacacatggctagccaattataggatggtattctcagggcagaggcacagatggcatcccagaaagctacaggagctcagagatgggattcctaggtgagctcggacatcaggacaggcagctgaaaatggctgaatcttaacagatgagtagaacagagctttgaagtagaaagcattctagcatgggcaaaggtttcaaggtgagaatttgcattgtgtgcatggggaaccacaagtccctttcttcttagtgacacaggaagggaggtgagtggcagaaggtggggctggagagttgttgggggtcagatttcaaggactgtgaattccacattgccttggtcatttccttaatacactgtatttcttgtttatgaactttcagtacctccctgttacctctgtgatgcagagaaaacatggagacctagcattcaaggctctccttggtctgtgacctgtctcttatttccaccttcagtgtccctacacattttgtcctctctagacaggttgtctcctgtcggcccgttgtaaaagttattctcattctggcttttctcactgtgccctgaattggtggacatgaccccctccctgtctttttgttatatgaacctcttatctctaagttcccctaggcccatggttttcagcccctaactgcatattagaacaaaaatatcaatatcttagcactactccagatcaatgaactcagaactctcgagtgtggggccagggtagtggcacgttctaaaagcccccagtgtgactttattgtgcagccaggcttgagaaccactgccctagaatccacaagccagctctcatcttttcttgccttatgtctcacgatgggggatcagtgatttatgctggtacagtcctactcagcactgggcttggcttagagaagggaccgtgggaatattccttgattaattcacagaagagctacataaatgtagatatggctcccagctgggaaaatgagcagaagtgagagaatgagagaatggtggtggtggtgtggtggggagcggagataatgctacaaagtgtgagccttcagtccctccctgcctcattcctcttatgcattcattcagtgtgttctttcagattcctgtgatagcatcatacatctttgtgccttttctacttagttcagaggtatcctagatctcttatgtatacctctttcattttctcctccaggaaaagagaactaatagtgccagctcagatgacttacacagtctttccaaaatagcagaacatacccactttctaccaggcttgctcttttagtcttgtcatttctgtaaatggcaccatcatccccttgattgcttcaacttaaagcctgggaattgtgctagtattgtctttctttcttactccacttcccacattcagttagtcagcaagtactgttgattctagctacaaatcatctcataatttcatgtttctgtctcctctggcacccaccctagtccaagtgaccatcatcttgcttgtgtgactatggcagccatttcctgctggtattctggtctccagtctggtctttcctcaagtcttttgggtacgcagcacactccctccacaggcccagcacagagactgttcttaaagttaggagcaccctccacctaggttactcttactcagcccccacacctcagctccagatcacttctcgaaaggaagcctccttggtccccaggagtagatcaggttcctactttgtccctggcatcatgcatggcacataataggtattccatgaacatttcttgcattgaatgagtgggtgggtaggtggattgaatggatggactgatggatgatggattggggatcagagcctaaggaagtattcagacctggatccttgcaggtcctcagctcaggaggtaggaatggtcattgagggctttgacacactagataaaccaaatagtgccagagggtttaaaggaagaagctgacagtcttcctaactcttaaccccagccctgcttcctagaggcaaacacttttaacttcctgttttccatccttttgaaaagcagttccaggaattgctttgagtaagcaaactttcagatttgccattgacggaccaatgcaagacaaatgcaagctcgtgcagagggaaaaacaagcatggtcttttaaatcagtaaggatgaaaatcagaatcccagctctgccaattccggactgtgtgaccttgagcagtagtcctcttgggacaaccaaattttcttatttgcaaaatgcagcagttagtctaagtcccttccagttctaggtatctagttctgtctctctctcttccaaccccctttcctcctcacctaggaatgctttgaagaggacccagggcgcaagtggatggacagcttgctcagtaacttggggtgccagtctgcctctcatgtagggcccttcatcgatagctaccgctgcttccaaccaaagcaggagggggccttcacctgctggtcagcagtcactggcgcccgccatctcaactatggctcccggcttgactatgtgctgggggacaggaccctggtcatagacacctttcaggcctctttcctgctgcctgaggtgatgggctctgaccactgccctgtgggtgcrgtcttgagtgtgtcctctgtgcctgcaaaacagtgcccacctctgtgcacccgcttcctccctgagttygcaggcacccagctcaagatccttcgcttcctagttcctctcgaacaaagtcctgtgttggagcagtcgacgctgcagcacaacaatcaaacccgggtacagacatgccaaaacaaagcccaagtgcgctcaaccaggcctcagcccagtcaggttggctctagcagaggccagaaaaacctgaagagctactttcagccytcccctagctgtccccaagcctctcctgacatagagctgcctagcctaccactgatgagcgccctcatgaccccgaagacyccagaagagaaggcagtggccaaagtggtgaaggggcaggccaagacttcagaagccaaagatgagaaggagttacggacctcattctggaagtctgtgctggcggggcccttgcgcacacccctctgtgggggccacagggagccatgtgtgatgcgtactgtgaagaagccaggacccaacttgggccgccgcttctacatgtgtgccaggccccggggtcctcccactgacccctcctcccggtgcaacttcttcctctggagcaggcccagctgaaccaatggaggcctggggacatctggcatggtcacccctgcacatgatctgaggmcagctccccttccctgagctgcctcctgcttctccctcaaagtctcctacccttctcttcctcttttaagccctctcttcctcgctttccttcctacctagctccttgttggtgagcttcttgtgccttaatcctgtgacccagccccttacaccactttccaccttcctgtccgaagtacacggacactagctgccccaggaagttgtgtgattttaaatcacttctgtctttgctggaaagtgtatttgtgcataaataaagtctgtgtatttgtttcagggttgcactttggacattgtggaggtactccataaagttgagtcagagaagctatctcaatacttggtttgccggctggctgtagcccaatgatgtaattcccagagaaaggggaggagggaggggggaggagggaatagtgaggcgtgagcagcagtgctcaccataaagggttctctgctcagttgtaggaatttcctgtacggctaaggtgaaatcagcaaggaaggtgggctgtgtagccttaaaccagagctttccagctagtgcgtcccacagctgccacagtgggttacagggttgaaagaaacggtcctcagccctcagagttgccaggcagggcctgggaccacacaagtttcagggacgattgcctccttagcaagtagtatcattagtacccctaagtgtgccatggaaatgtttcctgtatactgtgacctggaaagtgggagcattgctttgaacacagtgcttgctctagccaagcctcttctcacctttgaaaatgggactggtagaccaggcacagtggtgcacgcctgtaatcccagcactttgggaggctgagatgggtggatcacctgaggtcaggagttcgcaaccagcctaacatggtgagaccccgtctctactaaatacaaaaaaattaactgggcgtggtggcgcgtgcctgtaatccaagctacttaggaggctgagacaggagaatagcttgtacctgggaggcggaggttgcagtgggctgagatcatgcattgcactccagcctgggcaacaagagtgaaattcagtctccaaaaaaaaaaaaagaaaagaaaaagaatgggactggtaaatcctgttctgtgggatgccgtgggagggagagaggataatggattgaggaagacatccatatccccttatggaaaatacctctttggttttggggaaccactcctttctagggaatttggttagggctgactcatttcctggcttcaggggctaccctgggcccagatttccagggcccggattaccagtgaagcgtcaatccctggatttttattgaaaccattggagaagagccatctcaaataaatctgccaagtatcctagctctttgcaactcactgtgtagtttttgggcatttccttcctctttctcattctgtttccctgttggtaaaatggaatggtgaccaacaagtgacctatggttacctcatagatctgccacttgtctgagggagtcagaatgcacttgtctgttccctgtccaataaaaggcttcacatgctgtggtttgtgctttatttttaggctcaattcagctagaggcacacaacaaagcagaagacaggagtaggcctggacccaagtgaagcgcaggtggggtgtgaatcctaggcagctggcttctcaggcataggtggtgacatactggggccccatgttcccgaagtaggaacgttcccactcactcatgagctcaaagtgtacaggacggcgacagaaattgcaggcagccacagacacatcctggaggggcagccccaccgcagtccaagccagcagcagcttctctgaaggtggtagggggaggggagggaaaaaatgggttagactagatcttccaaatctgtcacagtacagatgagccaagatattgatccccctcaacccttcaagatacctcagggccagaagtagcctactgtttgcttctgtgtgtgccgtgaatattaccatttgtatctggatgctgggatatatattataaaagatttggaagctctcctttgacacaatttgaagccatactgtcctggcctggaccactccctaagtataggatgtgctgtggcccaagaatgactgtctgcttgggaactctaagccctatgaggacaatgataatgacagtaactatactgtgtcattggtgctatgaccaggaaacctggggtagggggtccacctgggggtgtgaaaacccagagaagggaacctgacctagctggaggaagtaccccaggtacgttccagggctctgttcttggccttttctgtgttcatgcccttgttgatcttgtctagtcacatgactttaaagaccatctatatgctgatggttcagaaattttaatctccagctcacgccactctactggtttccaatcttgtatatccaatggcttttctccatctccacctagatgtctaatatgcatttctaacttaggagtacaactgagctactcatgtccctaccctccaccaagctattctacttttagcttttcccatctcagtggatggcaattccagttgctcagtccaaaaatttcagagctatcctttatttttctctttctctcttaccctatatcccatctatcagcaaagacccttggctctaccttcaaaatctgaccacttcttattgccttcattatgatcaagtctgagccaccatcatctctcacctgggatattactgtagcccactcttgggtctccctgcttccacccttgctcccttttagtgtattctctacatagaagttggagcaattttgttaaaacccgagtcagaaatatcagtcctgtgttcaaatcctttcaagggctctcagagtaaaagccaaactccttctaatggcctaccataccctatacaatctggtcccacattgcctctatgtactcaatttttctgtctcccacttgcttataccattccacccacacccatcttcttactgttcctcaaatataaaaggaatactcctgtgtcttccctgccttaggatgttccctctgcctgcgatgccattcccttagatatctgcctcactaacttcacctccttcaaatttttgctcaagtttcacctcagcgtcttctacccttgccactctaatactacaacccttctctgaactcgcccctggccccttatcccattctccttatcctgctttattttttcccatagcacttagaactaatgtgctacttaatttgcttatttttggtaattttttttactaccccttccactagaatgtaagctccagagggtaggaattttgtgtctgatttgtttgctactgcatccccagtgcctagaacagtatctagtacacagttggtactcaataaatatttgttgaaagaatgcctaagttaagtctacaagatgaaggaaagtaagccagaggaaagtgtgagggagggcattccaatcaaaagagagcagcatgagcaaagtcccagaggtaagagagcagaaaaaaatgagggaacgacaagtccttcagtgtagctgaaaaaacaaaatgcatgtggggaggaggtgagggcatagagatcaccatgtggaaggcattgaatgctatgctgaagagcttcaactctgtcctatatgtcaatgtttccaaattttggactatacatccctatcagtacaaatgttttagcatgtacctccaatctctatatttgtttatatattatatacatgtataactgtcagtctgtatattaaagatcagtatcagtgatgcttgatttcctatttttaagataaaaaaacataaaattctaatacatattctgttccttcaccctgtaatcattttgcataccccttggaggtcactgctttagagtctagagggaaacatgaaggggtttaagcaagggagcaatatagtcagaattttagaaaaatccctctagtggtcatcatcgagaaaggatttgagaggagcaagagagaagcagagaaattaggaaaaaaatcatgttgacatggattaaagaagtggcaggggagaaaagcaaataggtttgagagagattatagataacttttgcaggatttcaggatggattggctatggaacttagggactggtggagccatcgtggatgcctcatatattcttacaaaagcctagcctaggtggacattcagagaaccaagaatactgagagctctacaattgaagcccagagcaaaagagaatactgaacaaaaggcccaggagtctgggtcatcagctcagagaggtggtagacctagcagttatgaccatggaggtagagacagacctcccagttgcaacttagaagctgtgtgaccttggatcagcgactatatatttttgtgcctcaatttccacatgtacaaaatggaaatgataagaggatctctaactcttgaggttgttgtggggattagatgagttaatacgtgtaaagtgtttagaacagtgcttggcacatggtaagtacttaatgttagccagcattatttaatgtttttgaatgaatgaatggcgcctacctagcttgtcttccttgaattctcatactgcccatgcttcagacaaacagaattatgttgtcaatacatacccactgctttcctatctctaggtcattgctcgtggaattcccttattctggaatattcttacaacatattcacatgtacttcaacatgcatcataaaaacttccttactcacaaagcctctccaatttcatccttcccaccctctctctccataatgtgtccactccctctagctcccagaatactggagctcatcatactggaccagtaccatctatatctggctcctctgctagaccatcaactgcctacatgtctttcatccaacaggcctggaatgagcacctattcaatgtcaggccctgcattaaaaactacccaggccgggcatggtggctcacgcctgtaatcccagcactttgggaggcctaggcaggtggattacgaggtcaggagttcgagactagcctggccaacatggtgaaaccccatctctactaaaaatacagaaattagctaggcatggtggcacgtgcctgtaatcccagctacttgggaggctgaggcaggagaattgcttgagccaggacccgggaggcagaggtagcagtgagccaagatcgtgccactgcactccagcctgggctacagagccagactctgtctcaaaaaaacaaaaacaaaaacaaacaaacaaaaacaaaactacccaacagaaatccaacaaacattaggtgaattgactaaactggcattttcagggtaaatctcaaactactcagctctacaagcctctcaatccagtctctatctcatgttgtctttgtagactcatagattgatactcccctgccccactccattcctatgaccctacattccaataccacctgcttattgttcttgatatatccctggctgcttctcattctcctcacctatcttcatgctcttccctctggtaggaatacttcttccatgccctctttcttttaataccactcactttgcaagactcagctcaggtgtcacctctactaggaagtgggtcttgcatccctcaggctgagtcaggcccctcctctctgctccgacaactctatcatgcactgccttgtggagctttgatcatcccttagtgtcattgtttgtgttcactatggtatccccaaccaaactggagccctacaagtgtaggggctgcttctcatttatttgtgaccctagtataggtgctggcacacattagatgttccagaaatattttgtaaactcagtggtctctgtcctctcagcttctctttcagatcctggggctgaggggagggaggtcctgtaggcacccatgttgagaacttacccacaaaatcttccatcatctgagggctgtggtggggggagggtgccaagcgcaggagctcttcaccccgggggacagttgggtagttgatggcctgcacatagatgccatgcttggagagcaggagatcacagagcttgctgttgagtgctgcattgcccacctggactcaggagaaaggctaatcagtacctgccactctggctccaccatcactagctccattaagcagatggagggaactagatgagggaacatcactgaattttgggatagattttttttttccattaggggcttagtggcagctccagaatttctatcaaggaggagctcagagctagcaatttggtttgaaaaggatggagcagaggtggtaccaggagccctgtttggaagctgtttgcagagcaagcacactgatt

SEQ ID NO: 94249 - DNA, 73208 bp, Homo sapiens
ccagttgggctcccgctccttccgctcggacagctgagtctcaatgcgtttttcctctactcagaagtccaagtggtgcgtccggttacttacaaacggcattttgccactttttaagcgacggaaccctgagcggaactgctcagctgccaaagccccgccctcagtgcggcggaccgcccacctaagttcacagatggctgcagcgcttgcgccccaggaatagctggcgctaagtgctcgcgttggactgggcaaagggaagttcatggttggaggagggagcagtaagagtcgctccactgagataagacttaggaggagggcctttggctttattggggcagaggggaggaggaggaggctgtctcaagcctgccctgtagcttttgtcttggctcttaacattctgaaggatgtagccggacacatccttactcttggttctgtttctcagataagtgaaatcgaagcccaggaaatgtaagctcgtgagcagcattgtctccggatgcatccatggctcttctgtatatgttatctcatttcattctcaagacaacccagttcgggacatggaggctaagttagagacgtcgaatgaattcatttcattctcacagttcactctctcttacactgaagtagtagagccaggattcacaccctgtcttaattagctcaataattacttttctgagtgtttttactgaccacacacctccccagttaagtcttttcctctggggccccacggcaccctatggtccattctgtcacagtacttataatacacagctatcattgacttctatttctgctgccattagaatgccagcaacttgagagcaatgaccatgtctggttcatcttgttagccccatcccctaatactggacacagcatatgttgggaagcaatagatatttgtcaggtgaatgaatgaacaaaggataatagcaagagcatcgacaggttcatggcttgtttttgagagcacaaaaattagaagtaatggatatgcccaatgtccagggaaaagcataacgatgcatctttaggttcctcacccagaattgcagcataattatttgttccccagaatttaagtcttagagccatcatcctcaatggttacagcaaagacgcagtaaactgcttttcctcctggaggacttaaaaggttaccagttgttgctatcagaaaatagctctgtgattaaaataaaaatttgcatgtcctgagcttcttcatgctttgggagttattgactcaggattgactcccatgagtgcgataactaggacaaaggaaatgaacatttttattgctcttgcttcatattgccagattgctttccagtaagggattatgcccatttacactgaagatcgatctgaaactcagcaccagcraaatccagaacttgcctgtctccatggctggttttaatttccccattctgcagtggcttgttaatattagttctgacctttggggcaaggtgaacacatggttggactgaagagaaaaggcttctggtggctcaggaacgtctttggcaactacaacagctgatatttcaacagagcacatacatcccccacttaacaagggtacgtcctcagccttctcagggaaccaacgaacacctccaggcttcctctttgatgccacccactggacctgccttgggggtctgtaaatgcaagagaaccgagtgttggataattagcgatggaagaaaaaacctctagaataaaaggtaggtgagaaagaagggaaagtaggcaggagttgcacaaatccacatccattcttcaggccctctggaaagttttctttgcatagatggttggttgtcgtgtgcattaaagggcatgggaaagtgggggaaaagattatatctatatgtaacctatttatctgtctgtatatttttaaaagtccattctggcctttatgggacactggcccccagggcaattcactagcacctgtgaaagtctctctaacttggtcaagtctggttttgaatgaactgagtgattgagattatagctcttacctccccactgatgtgtaaagtagggttgatttgctgtggcgctttgaacaagctctcttgcttctctgggcatcagtagcttcctcagtaaaatggaaatcaaagtctctagccaacgttcctcagagggctgtcacgatcaagaagagtggaaaggcagaaaccaaagctctttggagacatttcaggacttcctcgctctaagagtagtcatcttgctttttctataggctccacaagcaatcccacccaaaaccctccagctgctgtgcgactatagtctgtggagagccacttccatgactaggattcagtgaggtttggggcccaggcatgaggccgaaaatagtggagagatggtgggccaggacagtgggtgagaaggaaggggatcctaggctgctgtcacagaaggcctgacactcatatacatgcacctagcttgtaagtgtgtggtcgatctcccctcacaccttcactctccacaaatgcattcatacccaaacagtctgagagctaccaatagggagaccccattcgtgactttattatccatcagcactgtcatatgctgctttacatggtattctcccccgatacacatgccctatactttgggaggggtatggggtcaggatctgggggccttgggaaatcacattgtaatcttttcttccctagagatagccccattttagaattttagaccaagagctgcaggtcagagcttgatcttgaatgagaatctggtactgactgaaccctttctctgccacgagttcattggcccttttcagagaggacttcattcttttatctgtttctgtcccattcaaggtagagaaacctttctggatgccacctcctacctcagacaaattagttctcccatccaattccctgcacagctctctgttataatatttaccttgttgaactaggattagttgtccacaagttcatctcatctagggcagagagatgtagactgcacaaacacaataagcaagtgtcttctctgtcctctgtgccagggcctgagttggacactggaaacacaaattacagatcactgagatctagtctccatactcaaggagttcacagtctagtggggaagcagaccaggaaaatactggtggatacttgctcagataggagcatgtgggcaatataagaaccaaatacaaggcctgtcccaaggatacaggggtcacttcccagaggaagtgaacatcaaaccagaccttgaaaagtggatcagattttgttgggaatagaaggaggaaaatggcatttcaggctgagcaaaggccaaaaaacaggaaaatacaccatgtattttggggcccagtgagtcagccagtgcagtttaaggatgatctaaggagagatatggctggacagataggctgaagcttgattgaaaagtcttgagtgccaagctgaggtctttccataaagcttgttttggtctcctgcttctgggatcagaattggtaacagtagtgaggaatctcatagctaattccaggcaattttaagttaggctttcaagcctggaccccaggtttaccctttaagactttgtcaaaagcctgccagcttcttatctcagatttcctgctgctaaaattatccttctgcctgttggcagggccatgaggacaaaattgtaaacataaaagagatgttcatgtgaccagctagattaccttgaacatgccacttcccctccccagacctcagtttccctgtaaggctaacaaggatgtttgcaaggatcaaataagataaggaatatgttgttgctttgtgggcaatggaaaacatacagggaaagggttataattaagattattaatattaacagatttataccagttaggaaatttattagaattaaaagagttgtatctcttacaaagtctagttctgagactctagaggttctgagctaacctgtaagaccacattcttagatcaggcttgtttgattaattaaagaaaagccctggcctgggagaaattaggtccctagtgttctattcctgacttggccactgatttactacatgaccttaggaaaatatttctagacctcagttttcttacctgagagggtgagatgaaatgatcttgcaagtctttacacaaaatcaaaagagtaaaaccaaattcatccttctaattgatttgcaggagctctttgtgtattataaatgttaaccctttcccataatattgtaagtttccttaactgagagttttctgtatggtcagcattatattagaagtttcagattagtcaaggaggtgtctgatcatttacctcccaaagggagtaacagtgttagataatatatttttaacatttcacagattgctttacattttttaacacattgaatcttcaacagtcctaaggagggtaggtactcctatcattcccatgttccagataagaaaactgaagcactgaaaagtttagtcttctgctcattgcctcatagccaacaaggggcagaggtaggattccactcaagaaatattgctccagagcctattgctcttaaccatcatgatctgctatctcagttgattcatttagataggtgggctctggaatgtattaaaaatttggtatgatttatacacaacaactggagggaatctgacccttgtgtagactacggcttgcaaatgtattttagggaacttcttaaaaggcaaagtggaactgagagcatttgagggcagggattggaaatttctgtccccaagagattgcccttgtgtagcccagctcagtggaagaaagttgagcttcttcatagycaatcgttggaggttcattgggggtgggaaggttgcaaaagagtgaagtaagaggacacttgtgcatcttcgaggcaagctgtgcagttctatgagttatacacataaaagcctcaaaacaacrggtcaggggagcgggagagggcaggtgagagtgagtcatctgggctggatgactctggcctatggacttgtcctactttgaggccattgctctctgttccctgctgcagcctccaccctcctaaatctccatcctaatagcttggcatgaggaactttagtgaaattttctatcagttcatgatgccagtgtcattctccttagggcatctgatggtggctaacagccatgtgggcagagcttaccattcccccacctccagccccaggcaatggctgcactcttccaaaggtgtcagtttactcctatttatttagcccttggctggagagagtagaaagatgatcggatagtgcccatctcttcaagagtgctccaggcagcacatttcaggtgggagaggccctgtggcaaggaaggcagcagaatccagagaagacaagggatgcaatgccattttgggtcggggaagcagagaagtagtggaccttccatgtccagtttgggcctctaattgccagctcaaaacactgcattccccagtagggactttgtgtttgtgtttttgtccttgggaaccttgcatttctgatgtgaatcttggtttctgggttggagcttgacattctacttgggcccatttttttatttcaaagctgggaaagccgctgagacctacctccatcacctttgcctctataccccacacaggctgtaagcacatgatctttggtcttttatttgcatactctattagtcttgtcttcattggagggaagtgactggtcagacctgggctgtgttgctggctgccttccttgttgggctccaacttacctcctatgtacacagcccttggagttcagaggcctctcctgacctctgcccaacctctcgccctctgcacccaataccccactagtacatacaggagcagaggcaggctaggaccagaggaaagaagagaggggactgaagacaractttgagagggctcagaaacccagtacaccccctgtcccagccctgtccacctgctgctgtggccacagcgagagaaaagacagctagtaagataggaagtgaggccaggtaccttgtgggcagtgatgtcattcggtgcgactcctaagatgtctccagagatgggagagctcacccaaaccaggttgcagaagatctggattccacacagcagcggcagcagcaggctgcaacggagaaggggctgtaagtggggtttgcttccgtgggtttaaaggtggtggtggtagagtgggtgtagaagagcaaaggatgcacctccccttgccatccactcctacctcaacctaaaagttggaatagatgaacaactggatgaaatagaggctagtgtcaaaaacgtgaggaaaagaatgagagagaagacaggcggaaagagagatgaagacaaaggaggattaggttaagaccatcttaatcagagggatctttaggaacttttcctttcttatgcagagcttgtttggaatgcttcttgtttggaatttaagatttctagtttaggactgttcagtgatagcctagtatgtttcattttggtgacttctgtgaagtgtctgggagttggtcttgcctgactgatagtgcctgggtgaaataaggtgatggctcctggcatcatctttcaggggacaggtgctgggtacacaacagtgccatgtcactggtcagtattgctcctctcctttctcaggccttttctgagtctatacctgcctaggttgggaaacacttaatgtcctgtctccagtgttgccttcctggcacatatggacttccttgctgctctggaaatttgagagaggcagtctctcagggccagcccactggtgtggtgctcactttggaaatttaagaaagatcaagggcaaaacaaaacctgtacatatttaaaacaaaatctggagtgtaccatttcccatagataacaggcgacagtggtggaccaaggtgcatccagcccagggattgtggcctgagtggccataaggtgggttaagataaggcagctgtggactgtgggactcagacaccccaaaggccagctaaccaagtttccagtctgctaatgctagaggaggcccaggcttagggatattgggggtagcagtagttgcttagaggatctaggagcatataggatgttaaatatagttataatatacaggaggtagggtgtgggtggaggaagagagagaaaaaagactaggctcctattctctctctttcttatctccaccagctctctcactcactcatctggagatctaggagcctggagactgagaggtaccctcgcccagccagccactcttggccttttccaaggggctgtttagttgacaaacaagcaagccattctctgcatacacgggtcctccagagctagaatgcttatagtcctgggaactgtgtctttcaagttggagagataatatacataaatcacctaatatagtctctatcaaatagaaggtgaaaaataaatatgtgcttacttttgtttggagtgtcactttcctcagctataaaacaggattaatgcctgcaacccagtgttattgggagtaattcactgattcagaggttctggatccagactgcctaggtttgagttccagctctatctccccctgtgtctgtgaccttggacaactctcttaacctctcttggcttctgtttcctcacttgtaaaaggaagttaataacagtgtagttgtgaagattaaatgaactggagcatgggatgtgcttagaagagtgtccagcacatagtacatacgcagtaattgttaattatcctaattattattgttcttgttatataaacaagaaagcgggtgtgtggtcttatttaccatcatatcctcaacatcaggccctgatcctggctcatagtagatgctcagtaaatggtcactctgtgctacttccactctaccactcaccatagccaagaatggggctctgtgtgtacaagacagtcactcattaatatttgactaaattttatcagaccatagatgcaaaaaacttagatagtggttgccaagtctggacaatgtctggttcacttcttgctagggaggccagtctattggtccctgtaaggtctgaatcacctttttcttggagcatcctctctagcagacacacagttacttaatgttattttgaagattaaatacattaacatgtaaagtacttgaacagctgtgcatattcttttctcatccaacattatgtttatgcgaaccacccattttatcgttgcaagcagttgtagtttgtttattccccttgtgaatatcccacagtttatccatcttactattgttgagcatttggttagtttctaatttttgattatgaagaataatccaatgggcattcttgtacctttatcctggtagagcaagtcccttcatcttgtccttcttatggagtgtcttggctattcttggtccaatgcccttctccataaattttggaatcagctttccaagttacacacatatacaaacacacacacacacacacacacacacacasagagagagagagggagagagagagagagaacttttgggattttgatggaaattacattcaatctgtaaatcagtcaatttgaggagagttgccatctttgtgacattgagtcttccctaaacacggtatatcactccatatattcagactttttcatgttgagtgaagttttataatttaatctataaaaggtttgcatgccattgtaagatttttttggcttattttttgttgctatcttaaacagtacctttttagaaaattaaattttatagcagtatgttgctaatgtatacaactgtatttgtttttcatgtaatgaatttgtaactagcaaacctgctaaactttcttatgagttttgataatttgtatgtaaatgacagctttcattttccccacaaccctcatttttatctttcttatattattacactgctaagacctcccgcctttaatatacacacacgagatgtgcagtacacgttgaaaagaaatgttaataatgtatattcttatgctgatcccgattttaagtttcaccattgagcaaatttgctgtagtttttttggtagatatcatttaataggttaaagacgttcctgtttattctgagtttgccaatacaatttttaaaagatgaatgaatattgaattttattaaacatgttttctgtattcactgaaatgacattaattttctattttaacccattaatgtggtacaatacattagagtttttcttgtgttgaaataatcttgcagtcctgggataaataaaaacttctgaatttctttcactaattttttgtttaggattttagcattttgctcaggaaagagattggcctgtgatttttccaagagtgtcaagattacactaacctcataaaatcaggtgggaactatttcctttcattctgtcctctgacagaggttgtctgcagaactagccattcctcaaatattttacctggcagcatttccaggtaaaatatctggacctggtgtctcctttaacattttaactgatacaatctcttttatcagttatagagtcctttcagtttgctatttccactaaagttagctttcttaagctttcctaagttatggttttctatgaatttttctacttcacatagttttcaaatttattttgtgtaaagttcttatctttgtatcttttttatctctgttgcatttgtagttatagcttctctttcattataatattatttatttgcaccttttttctcttgatcaatcttgctataagtttgacacttttataattctaaaataatcaacttttgactttttgatccttttttatctttattttctatttaactattttttcatcattattctgtttctcctactttctttggatttattctgttgttcttttttaactcatagagttgcctgctgctcagctcattcattttcagactttcttcttttctaatttaagtgtccaatgagataattggcctactaaacagggctgatattccacagattcacaatcgtatggccatatgaattttcagaatatttctagtccattttataaataggcactctcccaggcttttttagtctctccaacacttacccagttaccctggccacctcaattcctttcccaggatagccaggacctactgattatcatctagcaactaaaggattaatgcctaccacagcaggaggcctccagtacttggtgccagcccttggaccagcttctgttttgatagatcagtgctcttgtcatttctattttaattccattctggtcagagaacaaactttgtattatttcagttctttgaaatctgttgagacttgctttatggaccaacttatggacaatctggtaaatgttccaagagcacttgaaaagaatgtgcgttttacagttgtgtttagtgtactatatacctcgattaagttgtgtttgttaatctggctcaaatgttctatattcttctggggttttggctgcctgttgatatggaaaatttgttaatgtttccttgtaattctgtcaatcttgaaagttcgtagttacaaacaaatttagaattgctatatcttccttgtgaattgaatattttatcaccatgtaaggaaattattaactctggtaatacctggtaatttggtatcattgatgtttttgccctataatcaatcttttttctcatattaatatacctacattagctttatttagcttaatatttgcctggtatgtgttttcctacatttaaaaaattgtttttgatagagatataattcacataccataaaattcaccattttgaagtatacagtggttttgagtatattcacatagttgtgtaaccatcaccactaattccaggacattttctttatgccaaaaaggaattccatactctagactcactccagatgaccctctccccttagcccctggcaaccactaatctactttcagtctcaatgaatttgcctattctggacattttatataaggggaatcatacaatatgtggccttttgtatctggctcgtttctttgggcatgttttcaaggttaatccatgttgtagcatgcaaagtcacaaagatatatgcctaggcttttttctaagagttttatagtcttggctcttacatttaggtttttcaatttattctgagttaatatttgcatgtggtgtgagatgggaatccagcttcgttcttttgcatgtggctatccagttgtcctagcagcattttttgaaaagactcttctttcccctacttaattgtcttggcacccttgatgaaaatcaggtgactataagttgaagggtttacttctgggctctcagttctattccatttgtttatatgtatctctacccttataccagtaccacacattcttgattattgtagtttaattgtaattttgaaattgggaagtatgtcttctaattttggtctttttcagattgtttttatgattgttttggctattctaggtcctttgcatttccatataaattttaagaccaatttattaatttctgcaaagaattaagctgaaactttgacagaagctgcatttaatctatagattagttagggaatattaccatcttaacaataataagttttaggtccctgaacatgagatgttgttgcatttacttaggtctttaattatattcaccaatgttttgcagttttcagagtgttttacattttttaaagtgttcttttaagcattttattgttttgatgctattgtaaataaaattgttttacttaatttcattttgtttgctcatggctactttatagaaatgtaattgatttttatatattgatcttatattctgcaacattgctggactcatttattaggtccaatggtgttttttagtgcattccttgggattttctatatacaagattatgttatctgcaaatagaaataatttcatctcttcctttccaatccagatgccttttattttctttttcttacctaattaccttggctataacctctactagaatgttgaaaagatgagatgaaaacagacatccttctgttgttactgatcttggcaggcggcatgggagaaactattcaatctttcaccattaagtgtgatattcactgtgggtttttcattggtgtcttttattaggtttagggcctttccttctagttttaatttgttgttggttttatcatgaaggggtatttaatttcccaaatgctttatctgtgcctattatgatgatcatttggtttttttgtccttaattctattgatgtgatctgttgcattaattgattttcaaaggttaaatcaagcttgcattcctataataaatctaacttgattgtgatgtaaaaagtataagtataatatatacatatatataatgtatacatataaatccttttatacattcctgggttcagtttgctagtgttttgtggggatttttacatccatattcacaacagctattggtctataattttcttttcttctaatatatgtgcctaactttggtagcacggaaatactggcctcatagaatgagttgggaagtgcttcttcctcttctactttttgaaagagcttttgaagaatcgtattattctttaaatgtttgtagaattcaccagtgaaaccatctaatcctggacttttctttctggcaaggtttttcattacttattcaaccccttgttatagatctatttagatttcatttcttttttagtcagttttgagagtttgtatcattctaataatttatctatttcacctaaggcatttattgtgttggcatacagtttatgattgttcataatattcccttataattctttttattttcataaagtcagtagtaatgtctcctctttttttcctgaatttattaatttgagttttctcttttttttcttggtcagtctcactaaaggtttgtcaagtttattaattttttcaaataaccaacttttgattttgttgatttttttctaatgttttcctagtctctgttttattattttcacctctaatccttattatatccttcttctgtttcctttaggttcccatatttgtgaatttcccaaagttctctctgttattaattttttattttactccattatgattggagaacatactttatatgatttccattcttccaaatttattgaagcttcttttatggcctagaatattgtctctcttggagcatgtttgatgtacactttggaaaaatgtatagtctgctgtttggagatggagtgtttkacagatgtttgttattactactttgtgttgaagtcctctatttccctgttgttgatcttctatgtagttgttctatccattattgaaagagtggtcttgaagtttccaactattgtcagtggattgtctatttctcccttcaattctgccagttttgcttcatgtatttggcagctctgttgtttaggcatatacgtttatacttgtgatatattcattatggattgacccttttgtcattattgaatgtccctatatatctctagtaatgtttttgaacatccattttgtctcatattagtatggtcactccaaatttcttgtggttgttgtttgcatgatgtattacttacgttattttacttttaatctatttgcttctttctcttttttcttctttcttttttagaatagagatggagtctcactatgttgcccaggctggtctcaaacttctggactcaagggatcctcccaccttggtttcccaaagtgctcggattataggcgtgagccaccaggcctgccttgtatctttcagtctaaaacctatcttctgtaggcagcatgcagttggatcttgtttgtttgtattcagttagatattctctaccttttgattgggttgattaatctgttctgatttaaaatcattattgatatagttggtttaaatatgcagttttatttttccatagagctcatgtctttttctctctattcttcctttactgctttcttttgcattaaatgaattattctagtttaactttttaattcatttgatcattttttattatatattttttaggtatattcttcgtggttgttctagggcttttcacatacatcatacatcagtgtgcttcagatttgtactaatttaatttcaatgagatataaaaattttactcatatatagctctctttcaccttcctttttgagctattataatatatatattatatctgtatatgctaaaaactaaataatacatcattataagtattattttatataattttatgttttaaggaagctgagaaaattaaggagaacatgtatgtatttattattttctattattttcatttgttcctgtgggtttgaattaccttctggtatcatttccttatttctatataactctttgctttgtgacttggctaggctatttttaaagtatgtttccctgcagtgtgaacccttcagtgttgcttcttggagtgcatagtttttggcttgcaggtaatttgggctttctttgactttttcccagtctctctattaagctgtcagcccacatgggggtattacactctaggctccactaattactagctgaatgctgtattttgtttttgttttttgtttgtttgtttgtttggcagtgtcctgaagcatgcattgcccagcagccttatctaattaaactctagcaggagtagtttgtgaagtaagtcttggaggtttcttcataccccagaagggctcttcttacctgtccctctctctcttgttctctctgatgaacaagctggcctatgttgctgttagttaagtgaacttgtagtttttgagaacatccttgggcttgagcttctttgtactatgttaaaaataaagttagttttggggggagagtttcagagctctctcatcttatgaatttcttctctccatgggtatactgtctgagcactgttctgggtgctgggcgagacagcagcttctggtcttagtttgcctatcctggtgtggaacctaccctgtgagcaagatggaatgagggtaatcaggacctcagtattcttagcctattgcacctggtatatagcctccattctatgagtaaaaactgggaggaggaagggatcctccaacctcttaaccacacttgccaggaatttagcctctgcaattctgagctgaagggaatgctaaatgctagctctctgctccttccagtaagatgccaaagtattgatgggacattctctccaagacgaaagggagcttcatcttggctatacacaccttaagtggagcttctatcaagctaagcttggagccagtagtgaggggacagtagtaaggtcgggaacagtagcatggcacatgtatcaaagactgtgttcttaccacatttcagtagattttcttgaataaaaatatcttcatgtactgtattccattaagacaatttccagagattttaaaaggttgttgtgttgtaattttgccagctgagcttgttttattagagaatgggtctttagagctcctcatgctgtcatgccagaaatgaaagtctcaagattgtctttgtgtgttgatcttgtatcttgcagccttgatgaactcacttgttagttcgaggaatttctgtagtttagggggatatttctatgtagacaatcatgacatttgcaaatagggattttttaaaaattattttccaaaccgtatgccttttatttccttttattgccttattgcagtggttagaacttctagtactatgtcaaaagagtggagaaggtggaaatccttacattagtcctgatgttagggggaaagcatttagtctttcacttttaagtataatgttggtgatagtttttgtttgctttatagaagtttcttatcaagttgaacttaaacaaatttacaagaaaaaaacaaccctattaaaaagtgggcaaaggacatgaacagacacttttcaaaagaagacacrcatacagccaacaagcatatgaaaaaatgctcaacatcactgatcattagggaaatgcaaatcaaagccacagtgagataccatctcacaccagtcagaatggctatcataaaaaagtcaaaaaataacagatactggtgagattgcagaagaaagtgaatgtttatacactgctggtgggaatgtaaattagctcaaccatgtggaaagcagtgtagtgattcatcaaagagctaaaaacagaactaccattcaacccagcaatcccattactgggtatatacccaaggggatataaatcgttctattataaagacacatgcagacatatgttcattgcagcactattcacaataccaaagacatggaatcaacctaaatgtccatcagtgatagactggataaagaaaatgtagtatgtgtatgccgtggaatactatgcagccataaaaaagaatgacatcatgtcctttgcagggacatggatgctggaggccattatacttagcaacctaaaaggaacagaaaaccaaatactgcatgttctcccttgtaagtgggagctaaatgatgagaacacatggacatagaggggaacaacacacatttgagacctacctgagggtggagggtgggagaagggaaaagatcaggaagaataactaatgggtgctagttaataggtaataggtacacctgggtgacaaaataatctgtacaacaaactcttgtgacattaatttatctcactaagaaacttgcacatgtacctctgaacttaaaataaaaaataaaaatataaaatcttaagcttaaccattcagaaaccaccaactaacctctaactatggactttctactttaagcaatcaaatatttatttcgtctttcttctgagaacaccttataaaagttttctcttgatccccctcagtggagccctgaactgcttgtgtattgtgcttcccaattcacaaattgctgaatgctcaaactcattaaaattatttaaagaaaggagtgcctatcaagtttaggtaattcatctctattcctaacttgctgaaagtttttatcattaataggttttatgaagtgctttgtcagtatgtatttatttttcttctttagtttgttgatagggtggattacattaattgattttttgaattttattctagtcttgcatacctgtactaaatcccacttaatcattgcatatacagtcatccctcagtatctgcagaggattggttctaggaacccctgcagataccaaaatccatgaatgctcaagtcccttttataaaatggcctagtgtttgcatataacttacacatatcctctcatttactttaaatcatctgtagattatacctaacacaatgtaaatgctatgtaaatggttgttatactgtattgctttttatttgtagtgttttattcttgttatttttattgtttttaaaagtattttctatctgctgttggttgaatctgcagatgtggaacccacagatatggaggactgactgtaattattttcatgtaatgttggattctgtctgccaatattttgttgaggattttttcatctaagtttatgacagagtggactatagagtttttgggtttttggtaattcatttgtctggttttgatatcagggtaattctggcctcataaaattagttgaaaatattccctcctcttcttatttctttgaaaatgttgtttaaaatttgcattaattcttctttaaaagtgttacagacttttgaagtaaacacatttgggtctggagatttctatttctggagattttatgttgaactaaattattttaatgtttataggattattcgagtgcctgttttatttttggttgacttgtgagaggctgtggttttcaaggaattgatccatatattctaaatagataaatttacaagtgtaaagttgtttgtagtagttaagtattaaatagcttctggcatccagtgctttccgcacgagataagcaaatttcagatgctttctctctctctgaaagtgcctgactcttcagatttcaaggtagtagttttctctatggcctcagttctctaatgggtcccagaaaagtcattgattttcagtgtgacccaatttttcttattgtaaagatgagaataagaactcccaagctcttggaactgaaactagaagttccttgcttagttgttttataaacccatgaaatagacatttttattgttgtttctcaagtcagtgttggcttagtttgacacacatgtttaccattttacttgctcaccatttcttcttgtctcttagccctttcttttggtactatttttcttctgtctgaggtacattccatagaacccttattgagggtctgttggtgataaattctcttagagttgtttgcatgaaaatgtgtttatggcatcctcattcttgaagagacttatttctgagtatacaattctgggttaaaagttattttctcatagaacttcagtaatattatttcactatctctggttttcattattgttgttgagaagtcaactgcgaatctaattgttactcattaggtaaactgtcttttatctttgattgctttttaagatctattcagctttagtgttctgaaattttattatgatttttctaaatgttgcttgtttttttttgtttgtttgttttgtttaaagttgggcttccctaacttgaggactggtatctttcatcaattcttttctttctggaactgtaattaaacccatggtagactttatcattctagccatgtgttttaatctctattttatatttccatatcttgttattcctacagtactttctatataatttcttcagatttattttccagttcattaattatctcatcacctctgtttaatttgctgtttaaccctcatacattgagtttttaattttaatgctctcatttctaatttctagaagctgtatttgattcttttaaaaattcatgtagtctttctttgatagtctcacatttcgttgacatactgttgataccttcttcatttctttaaacatacaaccaatgcttatttcacagtataaatcagataattccaattatagcttttgcaattctgattctttggtttgtttctgtggattcttattcatacaggtttttcgtgtgtgtgtgtgtgtgtgtgtgtgtgtgtgtgtgtgtgtgtgttggctttttttcttcctacacgggtaatgtacatcccagccccaaacccacataaatgcaggactgggctaggaaatctcaggaactgttcactcttttgtttccctccacgaytgagccaaggttgagacagtctcagttaggtgcttcttcttcacccgctgattacgtcacctttgtctggtccacactttagtcaggctctcagatccaacttcctactttgagcccaaagagttttgtttactatcttctatacgtgctatctcttaaagcccaagttttaagccagaaatgtgtcaatcctttgacaatggcccagagaagaaacattgttttttactttgccactcaataaacacacacgtttgtgtgtgtgtgtgtgtgtgtgkatgttaaatcaaaaaatatgctttttatgatccactgtattattgtgtcaactactgtgtaataaattaacctcaaaacgtagtggcttaaaacagcaaacatctattttgtctgtttctgtgggtcagagatcagtgcacagctcagctgggtcctctggctcagtatctctaataaggctacaatcaaggtattggctgaagctttggtcatctcaaggttctactgggtaggagtgagtggatagggatccacttccaacttactcacaaggttgttggcaagattcagttcctcataacatattggaatgaggtccttagtttctcactagctsttgaccagagatcatcctcaacttcttgccatgtgggtctctccctagggaagctcacaacatgacagctggcttccaacagagcaagtcaatgagagagccaaagaggaccaacaaaatggacggccagtctttttgtgataaaatctcaggagtgatatcccatcacttttgccttattttatgggttaaaaacaagtcactagattcagcccacactcaaaagtaggtgactacacaatgtcatgaataacaagaggtatggatcattaagggtgatattgtatgctgcctattgcacccactgaattgatttcatgtttgtgaaacactgctccaggctaccagggtaaacatggattttagtgcttttttatctctttagatcagtaattattttctcattcctggcctctgaggatttctgttggtttcacaccagctcagccatgctttatttgttttaaatccattatttttaggtgttttgtatttggaaggactctttacaaatatagcctaaaatatcaccagaaatagaaatctctcttctatattctaccrtatacaacttgagtaagataccgtactacttaaaattacctgaaagtttacagaagagcttgaggaaaatgtgaccagctgtcataagatccttttctaaaaacatgattaggtgataggataaataagagttttatccacctgaagtgtctagataggaagggaaagcattcaggaagtgaatggctactacctaagtctgtcctgggagtaagcttttttattttttagctttttatttttaaataattttagatttacagaacaattgtagaattgctgtatacctttcattcagcttccaccaatgttatcactttacataagcatggtatatttgtcaaaactaataaattaacatgggtaagttactattaactaaactacataatttattcagacttcttcagttttttcactaaygtcctttatatgttccaggatccaatccagcataccacgttgggattaattgtcttatttccttagaatcatccaatctgtgacagcttttcagtctttccttgtttttcataactttgacaattttggtcaagtgttttgtgaaatgaccttcaatttgagattttctgatattttctcatgtttagactggggctgtgggttttaaggagaataccatagaggtgaggtatccttctcatcacatcacatcagagggaagatgatatcaacatgacttattgctgatgatattaaccttgaactgttagattagttgtggtctgccaggttactatttgtctttcccatactgtattctttggaagtgaatcattatgtccagcccacactcaaggggaaggaaattaaatgccaccccctagagggagaagtatcaactaatttgtggaaatttattaaaaacactgtaataatttgggtaaaattatttgagcctatgcaactcttcagattctccttaaagtttcactcactaattttagcatgaatcagtggattgtgcctgtggcaattattacagtagtgttctaatgatgattttctgcttcccttatttattctacatttattatttggaatccctctataaagatttttcctttctcccctacttatttattcaacaatgtatatatataagtgtgtactcataaatatttaattatttgggttataatactcaacttatttattttgttggtcaccttgtcccagctttgcccattaggaactctttcatattggcttctgcgttctgttctatttttagtagactttatattttacagtagttttaggtttgcagcaaaattgagcagaaggtaccaagatttcccatattctcccttcctcccctccacatgcatagcctctcccattatcaatagccactgccacaggggtatttgttacaaatgatgaacctacattgacacattgctatcacccagagtccatagtttactttagggttcactcttggagttgcacattctataggcttgagcaaatttataatgacatgtatgcagtattaaagtagtttccctgccctaagaatcctctttgctccacttattcatccctgtcttttcccctcctgtgtccctttgatatacttctattctccttatttttctagcacttcgttacttttttacaagataacaccagcctcttctccaagaaaccatggttcctgtaattgaaaattggtatttggaaaccaagatctggatgcttttgttacttttagggtatcattaattctagcccgctcagcagacagagctaagaaatatttgtgtgcatgctaacccgtctgtattttgatgtctatttatatatacgttaaaaataaacatgagttaataccatttctgaccctaaattgcactataaggcatcattctagaccttctcccttgtttactatgagcttctttcttagactgtgaaatacctgactctcattatctacaagttatttatttatttatttatttgtttgtttgtttgtttatttatttattccaccctactacactggtagtttcagaattgttaactcatacccctgggagaaacaattttatcaattagagtacagtgtctacacacaattactttctgtcattagtcttaaaatattcagcaaaacactattttcgtggttatttatttcaggttttctttctccaccccatttagtgagattatgatatatatacttgtaatatagttagaaccatttgttgcaaactgcattcaatattgagttgctcagacattttggttgatttataaaaacttgaatgcaataaaattcagttttgtgagttttgacaaacgtataaagtcagatatcctcttccatagtaccgtatagaacaattccatcaccctaaaaattctcctgtacagcccattatagtcaacccttcagacctcccccaacccctggcaactactgagcagttctctgttcctataattttgccttgtccaggatgtcatataaatggaattatatcacatgtcagcttttggatatggcttctttctcttagcataatgcatttaagattcatcctagctgtatgaatatcaacagttatcttaattgccgtatggtattctagtttatgattgtaccacaatttgtttatccattcaccaactgaagagcatcttggttgtttccagtttttagtgatttttagtaaggctccataaatattctcatatacatttttgtgtaaacttaatttttcaattcccttccaaaggtatgtatgagtgaaaatgctaggtcatatgtcaagtgtatgttaaattttaaaagtaactgccaaactgttttccaaaatgcctgaaccattttgcatttccactagcaatgagtgagagttccttttgtaatacatccttgccagcatttcatattgtcatgtaaatttatatgtgtatttaattctagccattttaatagctgtatcttgaagtgtttctcattacacatttaattttcattttcccaatgattgatattatcttttaatacacttgtttgccatctgtacatttgggttggtgaaatgtttgttcagatgctttgctaatttttaaaactaaattttatcttttattgttcagttttaagtgttatttatatattttggatataccagatatataatgtacaagtatattctttcattctgtggcatttttcattcctttgtgtctttcacagataaaaaaatgttaatatgtaaatatttaacaatttttattttaaaatttttcgtaaataaaaatgtttaaatttttatagttcaatttatctatttttttcttgtgtggataatgctttttgtgatgtaactaaaaactaattggcatatccaatattttacattctctcccaagtcctttttttagaagttttatagttttacattttatatttagacctatgatccactttgaattattttttgggtaaggtttaagtattcaagttcattttttgcagtggacttccaatcgttctagcaccatttgttgaaaagactctattttctctattgaattgactttgtacctttgtccaaaattagttgactttgtccaaaatttgagtgggtctatttctgggctctttattctatttcattgatctagattgctatcctttttccaataccacactgtcctgagtattgtggctttataataagtctcaaaatcatgtagtaaagttcagtccaccaacattgttttatttatttatttattttcaatagtttttagggtacagatggtttttggttacatgggtaagttgtttagtgatggtttctgagattttggtgcatccgtcacctgagcagtgtacactggccccaatgtgcagtcttttatcactcaccctccttccatccttccccgcaagtccccagagtccattatatcattcttacccctttgcatcttcataacttagctcccacttataagtgagaacataacaatatttggtttttcattcctaagcgacttcacttaaaaaaatggccaccatctccatccaagttgctgcaaaggccattatttcattctgttttatggctgagtagtattccatggtgtatatataccatggtatatgatataaagaaaatggatacattttctttatccactcgttggatgatgagcatttaagttgattccatagttttgcaattgtgaagtgtgctgctataaacatgcgtgtgcacatgtctttttcatataatcacttcctttcctctgggtagatacctagtagtgggattgctggatcaaatggtagttctacttttagttctttaaggaatctccatactgttttccacagtggttgtactagtttacattcctaccagcactataaaagtgtttccttttcaccacatccatgccaagatgtatttttttttatttttaaattatggccattcttgcaggagtaaggtggtatctcattgtggttttaatttgcatttccctgaaagatagtgatgttgagcattttttcatgtgtttgttcgctgtttatatatcttcttttgagaattctatattcatgtcctttgcccactttttgatgggattatttgttttttcttgctgagttgttttgagtttcttgtatattctggatgttagtcctttatcaaatgcatagtttgcgaatattttctcccactctgttggttgtctgtttactctgctgattatttcttctactgcacagaagcattttagtttaattatgtcccatttatttatttttatttttgttgcatttgcttttgggctcttagtcatgaattctttgcctaagccaatgtctagaagagttttcccaatgttatcttgtaaaatttttatgatttcaggtctgaggtataggtctttgatccatcttgagttgatttttgtataaagtgagagaggagggtccagttttattcttctatatgtggcttgccaattatcccagcatcattaattgaatagggtatcatttccctactttatgttattgcatgctttgttaaagatcagttagctgtaagtatttggctttatttctgggttccgaattttgttccattgctctatgtgcctgtttttataccagtaccatgctgttttggtaactatagccttgcagtataatttgaagtttcagcaacattgtttttattttgcaaattgttttggccattgtagtttcttagcccttccatatgagtttcaggatcagcttgtctatatctaaaatatcctgatagggtttttattggtattgtgttacgtatataggtcactttggggagaatagacatctttaccatattgagtattccagtccatgaacacagtatgtctatttatgtagctctttgattttttaacaacattttgtaatttccagcatacagatcttttatacatgttttattggtgttatacctaaagattttgtcttattagaactattgtaaattttttttaactttgattttgaattgcttacagaactctccaccccaaatcaacagaatatacattttttccagcaccacaccacacctattccaaaattgaccacatagttggaagtaaagctgtcctcggcaaatgtaaaagaacagaaattataacaaactgtctctcagaccacagtgcaatcaaactagaactcaggattaagaaactcactcaaaactgctcacctacatggaaactgaacaacctgctcctgaatgactactgggtacataacgaaatgaaggcagaaataaagatgttctttgaaaccaacgagaacaagacacaacataacagaatctctgggacgcattcaaagcagtgtgtagagggaaatttatagcactaaatgcccacaagagaaagcaggaaagatccaaaatggacaccctaacatcacaattaaaagaactagaaaagcaagagcaaacacattcaaaagctagcagaaggcaagaaataactaagatcagagcagaactgaagaaaatagagacacaaaaaacccttcaaaaaattaatgaatccaggagctggttttttgaaaggatcaacaaaattgatagaccgctagcaagactaataaagaggaaaagggagaagaagcaaatagacgcaataaaaaatgataaaggggatatcaccaccgatcccacagaaatacaaactaccgtcagagaatactacgaacacctctatgcaaataaactagaaaatctagaagaaatggatacattcctcgacacataaacaccctcccaagactaaaccaggaagaagttgaatctctgaatagaccaataacaggctctgaaattgtagcaataatcaatagcttaccaaccaaaaagagtccaggaccagatggattcacagccgaattctaccagaggtacaaggaggaactggtaccattccgtctgaaactattccaatcaatagaaaaagagggaatcctctttaactcatttgatgagacgagcatcatcctgataccaaagccgagcagagacacaaccaaaaaagagaattttagatcaatatccttgatgaacattgatgcaaaaatcctcaataaaatactggcaaaccaaatccagcagcacatcaaaaagcttatccaccatgctcaagtgggcttcatccctgggatgcaaggccagttcaatatatggaaatcaataaatgtaatccagcatataaacagaaccaaagacaaaaaccacatgattatctcaatagatgcagaaaaggcctttgacaaaattcaacagcccttcatgctaaaaactctcaataaattaggtattggtgggacgtatctcaaataataagagctatctatgacaaacccacagccaatatcatactgaatgggcaaaaactggaagcattccctttgaaaactggcacaagacagggatgccctctctcaccactcctattcaacatagtgttggaagttctggccagggcaattaggcaggagaaggaaataaagggtattcaattaggaaaagaggaagtcaaattgtccctgtttgcagacgacatgattgtatatctagaaaaccccattgtctcatcccaaaatctccttaagctgataagcaacttcagcaaagtgtcaggatacaaaatcaatgtacaaaaatcaccagcattcttatacaccaataacagacaaacagagagccaaatcatgagtgaactcccattcacaattgcttcaaagagaataaaatacctaggaatccaacttacaagggatgtgaaggacttcttcaaggagaactacaaaccactgctcaatgaaataaaagaggacacaaacaaatggaagaacattccatgctcatgggtaggaagaatcaatatcatgaagatggccatactgcccaaggtaatttatagattcaatgccatccccatcaagctaccaatgactttcttcacagaattggaaaaaactactttaaagttcatatggaaccaaaaaagagcctgcatcaccaagtcaatcctaagccaaaagaacaaagctggaggcatcacgctacctgacttcaaactatactacaagcctacagtaaccaaaacagcatggtactggtaccaaaacagagatatagatcaatggaacagaacagagccctcagaaataatgccgcatatctacaactatctgatctttgacaaacctgagaaaaataagcaatggggaaaggattccctatttaataaatgatgctgggaaaactggctagccatatgtagaaagctgaaactggatcccttccttacaccttatacaaaaattaattcaagatggatgaaagacttaaacattagacctaaaaccataaaaaccctagaagaaaacctaggcattaccattcaggacataggcatgggcaaggacttcatgtctaaaacaccaaaagcaatggcaacaaaagccaaaattgacaaatgggatctaattaaactcaagagcttctgcacagcaaaagaaactaccatcagactgaacaggcaacctacaaaatgggagaaaattttcacaacctactcatctgacaaagggctaatatccagaatctacaatgaactcaaacaaatcgacaagaaaaaaacaaacaaccccatcaaaaagtgggtgaaggacatcaacagacacttctcaaaagaagacatttatgcagccaaaaaacacatgaaaaaatgctcaccatcactggccatcagagaaatgcaaatcaaaaccacaatgagataccatctcacaccagttagaatggcaatcattaaaaagtcaggaaacaacaggtgctggagaggatgtggagaaataggaacacttttacactgttggtgggactggaaactagttcaaccattgtggaattcagtgtggcgattcctcagggatctagaactagaaatgccatttgacccagccatcccattactgggtatatacccaaaggactataaatcatgctgctataaagacacatggacacgtctgtttattgcggcattattcacaatagcaaagacttggaaccaacccaaatgtccaacaatgatagactggattaagaaaatgtggcacatatacaccatggaatactatgcagccataaaaaatgatgagttcatgtcctttgtagggacatggatgaaattggaaatcatcattctcagtaaactatctcaagaacaaaaaaccaaacaccgcatattctcactcataggtgcaaattgaacaatgagaacacatggacacaggaaggggaacatcacactctggggcctgttgtggggtggggggaggggggagggatagcattaggagatatacctaatgatagatgacgagttaatgggtgcagcacaccagcatgcacatgtatacatatgtaactaacctgcacattgtgcacatgtaccctaaaacttaaagtataataataataaaactaaaaaaataaaaaaatgaattattgattgtatataatattatgattgacttttatgtgttgacattgtatcctgtgaacttgataaacttgcttattggtactagaaaggtttttaaaaatagattttgggccggctgcagtggctcatgcctataatcccagcactttgggagactgaggtgggcagatcacttgaggccaagagttcgagaccagcctggccaacatggtgaaaccccatctctactaaaaatacaaaaattagccaagtgtggtggcacatgcctgtaatcccagctactatgaaggctgagtcataagaagcccttgaacctcggaagcagaggttgcagtgagccgtgatcatggcactgcactccagcctgggtgacagagcaagactgtgtctcaaaaaataaaacataaaataaattatagatttcctgggattttctacacagacaatcatattatggatgaacagggacagatttatttcttcctttacaatttgcatgccttatattacctttcttgccttataatattgactgggagttacaatactatgttgaatgggagtcgtgagagtggacatccttgccttgttcctgatattagagagaaagcatttagtctgtcaacataaagtatgacattagctgtagattttttgtaaatattctttatctggttaaggaagctcccttctattccaaattgctaagagttttattacgaatggatattgtattttgtaaaaagtttttttcatctgctgatataatttggggcatcttaatctattttgtgctgctaaaacagaataccacagactggctaatttataaagaacagagatttatttcttacagttctggaggctgggaagtccaagatcacgtggccacatctggtgagggccttcttgctgcatcatcccattgtggaaggtgaaagggcaagagagagtgtgcttatgtgcgtgcctgtgcatgcgagtgtgggggccaaacttatccttttatcaggaactgttttctgagttaactaaaccattccattattaatgccattaattcattcatgagggaagaagcctctattcatgaaggtagagccctcatgacctaatcacttcttaaaggtcccacctctcaatactgttgcattggagattaagttccaacacatgaactttggaggatgtattcaaaccataccatggggttttacatctttagaatggattgctttgattgattttcatatattgaaccagccttgtattcctgggaaaaaccgtgctttcttgtggtatattaattatctattttatatatagccaaatttcatttgcatttttttaggattcttatgttcatgagggatattgacttggagttttctttttttgtatcacttatttttctggtttttatatcagggtaatgctggcctcacagagtaagttgatatgtattttcctgtcttctagtttcatagagagattgtatagaattgatgctatttcttctttaaatgaatggtaaaatttgccagtgaaaccgtctggacctgggtattttgggggaagatttttaattacaaattcaatttcagtaatatttatagaaggatttagattatttagattatttgttacattttggataaggtttgccagtttgttctttttgaggaatttgtttcatctatgttgtcgaatttatgtgtttagaattgctattatatactcttgtcattgtaatacctatgaaatttctatctactctttcattcctaagtttttatttcagctattatatttttagtccaaaatatccatttgattctttttttttattatactttaagttttagggtacatgtgcacaatgtgcaggttagttacatatgtatacatgtgccatgctggtgtgctgcacccactaactcgtcatctatcattaggtatatctcccattgctatccctcccccctccccccaccccacaacaggccccagagtgtgatgttccccttcctgtgtccatgtgttctcattgttcaatttgcacctatgagtgagaatatgcggtgtttggttttttgttcttgagatagtttactgagaatgatgatttccaatttcatccatgtccctacaaaggacatgaactcatcattttttatggctgcatagtattccatggtgtatatgtgccacattttcttaatccagtctatcattgttggacatttgggttggttccaagtctttgctattgtgaataatgccgcaataaacagacgtgtccatgtgtctttatagcagcatgatttatagtcctttgggtatatacccagtaatgggatggctgggtcaaatggcatttctagttctagatccctgaggaatcgccacactgaattccacaatggttgaactagtttccagtcccaccaacagtgtaaaagtgttcctatttctccacatcctctccagcacctgttgtttcctgactttttaatgattgccattctaactggtgtgagatggtatctcattgtggttttgatttgcatttctctgatggccagtgatggtgagcattttttcatgtgttttttggctgcataaatgtcttcttttgagaagtgtctgttgatgtccttcacccactttttgatggggttgtttgtttttttcttgtcgatttgtttgagttcattgtagattctggatattagccctttgtcagatgagtaggttgtgaaaattttctcccattttgtaggttgcctgttcagtctgatggtagtttcttttgctgtgcagaagctcttgagtttaattagatcccatttgtcaattttggcttttgttgccattgcttttggtgttttagacatgaagtccttgcccatgcctatgtcctgaatggtaaagcctatttatatcttctgtttcttcactgagtgcttctgttttaaatatttgttccaaaatcgcttgttattgttcattcaagcatttttattatagctaatttaagataatttaatgtaatctcatcattcatgtctgttgtctttttccatgttaattgaaatttttatggttatttgcatgctgattaattgtagtttgtatcctggacattgtgagtattgtgttgagattctgtatcttgtttatatcctatggagaaggtctatatttttgttttagccttttatatattttggttcccacatcaattcaattttccagcctttctcagtactatataggtctgtcctgcatgtgtaccatctagtggttagtctgagacttgggtggaggtgtaatttgtagttgagtttccaaatctttggtatgctaatgaagatcaaaggagtcacaagtcagaggtaagcccaggggttcaaatcaactttacactgttgctttttcaaaactcttccctttcctttatcttttcagtactttccagttccctgggctctcatttctgttttctcttcaaaaactacccactgtcatggttgtagcatttccagaaacaagtagcaggaggagagagtgaggatgagagagggagagggagagtgagaacgagagggagagggagaggaaaaactggtataaaggtgtcttcttgacatcgtggcttcacctagaggaaggaccttatcccacagttttgattcctggaggctcccattctgggccactattgcttctgagccacctttgcttttactacctccactgtggaaccaaagaaggagtaaataaaaacccaatggatttcccccactctccgaattttagttctcttttacattccttgagccaaaactccaagacttctcctgcatctctgtctgctaaacaatgctcattttggattgcacaccatgttgaattcaggctcaggatactgaatgggggaaaagtaatgttgaatttgcaattgtttagttggtacttcaaactctggtgtcttctctgatctacctacttagattttcctttcaattttcatatagttgtccatgcattctctcagagttttatatttgagttagtgagagataaaaggtctgagaattggacccaactatatatgttttgtaaatggcatgtagttggatcctactttttaatctaatctgaccatctcggtctttaattggaatgtttagtcgattcacatttaaagtgattgtcaatatacttagattaaaatctaccatctttctgttttcttttcattatatttgttcttgatgttttctatttactgtatttggctttcgtttcctttttccctctttttttctgcctttcattattttatttgttcattttgtgtgatcccattttgtctcatgtatttatttattatttagatatcttataaagaaacttttttagtcatttccattaagtttgtaatgtacatttttatataatttggttcacctttaaataatactatactgcttcatgtgtagtacaagactatccccaattccttccttccattctttgtttcattgttgtattccattattttttttacaaatgcaataaacatataatacattggtactattattgctttaaaagatcagttatattttagaacaattaagaatatgatagttatatttttcttcatttattccttttgcaacactcttcctttaattatgtacacccaattttctgacctatatcataaccctctttctgaagaatttcctttaatatttagactgtaagacagtctgctgatgttgagtttcctcagtttttgtttgtctgaaaaagtattttatcttaatttttgaaggatatttttgcagaacttggaattctggattggcatttttttcttacaatactttaaaggtttcatttcactgtctttttgcttatgtggtttctgacaagaagtctggtataattcttctctttgttcttctgtgggtaagatgttccccacctaccgccttcttcctggcaatcttcaagattttatttctgtcttgattttctgcaatttgaatttgatattgtctgggtgtggtttttggtttggttttggtatttaccctggttggtgttctctgagcttcttgaatctgtggtttggtgtcagtcattaatttggaaaattttggccattatgtcttcaaatatttcttctgccttattctttcttccccttcttgtgttctaaatacgtatatgttatactgtttgatattgtcccacagttcttggatgttttgttctggtttctttttttgctctttttttctctttgcatttcagtttgtgtgatctctattgacctatcttcaagttcactgatgcctcagctgtgcggagtctactgatgagcacatcaaagatagtcttcagatctgttactgtgtttttttctctcccatttatatttgattctttcttatacttttcacctccctgccgaaattacctatctgatcttgcatgataaacttttccaatagagcctttaacatactaatcatagctattttaagtttcctatctgataaagatggaaacagtagacaaaggggactccaaaagggggaacagtgggagggagcaagagttgaaaaactacctagtgagtactatgttcgctatttgggtgatgggttcactagaagcccaaaccccaccattacacaatatacccaggtaacaaacctgaacatataacccctgaatctataatgtaaaaaaagaaagtaaaataatccaaataaataaacaaattccttgtctgatatttccaacatctgtgtcataacttactctggtcctaatgattgcttttctcttcagacattgtttttattccttgctttgttcgccctttgtgctacaccctggagataatatatctcttaaatctcttatagatgtattccactgttatttttactgatgctttttagcctggtagtgggggaatggggacctgggacattctatgctatgctgattaagtctcagtcttaggcaggcttaccctgggtgttggaggtatgaccttcacaagtgttcctgcccctcctcctatgttctaacccaagtgggcttagcacattttcctgcccctcctgggttaggacttttttttttttcaattttctcccccagctgtagtgagttttcaccagtgccctcagtttctgttgccctttcttctgaggactaagacttttttccctttgggaagataaggtagattggtatgggcagagtttcagtgatgttggccattctgctctgccagctgcagtgagtttctcccagtactttcaagctggtttttgttgccttttccctgaatagtaaggcttttgctccatagagaatatagggaaactagtctgtgcagaatttcagcaacagctattatactgttctgcccgagcagaactacaggatatctttctcaggattcttctcagtctttcttgtcagcacctggggcagttcctggaggaaaactctgcaaaggggtgcaaaattgcctatgtctgcagcccctacaggcttcacattctcacactagcccataaccagcctttagcaattcattataatttttagctgaatcctcttataaagtttgtatgttgttcagtggtatctgcaccaggtaagcaaatgcctgttcctgtggctcccttgaagatggttgtttctacaggtttgtggtactgcaacctcagttttctgatgagtctgagagaagttcttaattttcactttcccggttttttcgttactgtaatggtgggagacatgttctttacaactctacatttctggcctaataccagaagagcctatgaatctgaggataagcttttgagggtctgtttatttttcagcatccataccccagtttaccaattcccccacaatggtgatcatggtgggtttaccagctcgaggcaagacctatatctccacaaagctcacacgatatctcaactggataggaacaccaactaaaggtatgtctctgaaagcctttgttcaacaaccccataaaagctactggctgaaaaccttacttaggtagaaggccaaagtcctcaataccagaaatgccccatcattattattaccagcattaggactactgctaccactattactacattcttatacattttataacttcttgagcacatactttgtgcccaacaccactctaggtgctaagcataggaaaactagtattaagattaaatgtcttctctcaagaagttccatgacctcaaaacaatcctgtgagtaacatattatttttattgccattactattattgccataccaatattactacttttattagcattaccacttcttcaccatttcatagctgaggaaattaaggcccaaggagtgaagtgccttgtctaaaggcatatatccagttacagaaccaagatatgaacccaggtctatttgattctaagcctgatattcactgtgccaagtctaatgcatgattctactgattggaagagaaaagaatcccatgttagccctatagtctccttttctycattctttttgtctccttcttttccttgttaatctcaacatcctgtctctctgccccacttcactctatctctccccctcttccttcctctccccaatttttgtttctttttcccatttcttctttctgttcatctatgttctctttatctaattcactggtgaggagtttcccgatggtttaccatgtgcccaaactcctgctaggcagtggggatacaaaactggttgagactcacaccctgtccttgaggagttctgagtctagctgggatgtataagaatacctcatatcatctaggaattctagagcaggagcagggcgctgtatgaaatcacaaagggatatgccaactggaaggcaaggaaagcttcctacataggatatgtttgagctgagtcttgtgggaggaataagacattggcagaagggaaggagagaaggagcagctctcatggaggactgcaagctctcaggaaaatctgctgagtgtagaggcacatgggacactggcagacgggtttctgccttaagggccccatcatgggttctgattcccctgctttctatcttcttcactcaattctctcaaaggcctccagagtcatatttcaaagcacaaagctgaacatgcctgtggcctccaaaggtccccttggcctgcaggtttaaatccaagctccttaccctgttgttcaaggccctccacaattggccccttccagcatctcaggcctcagctatagtggatgactcaccatcctccaaacatgctcttccttctgccaatgccatactcttgctcaagctgttcctctacctggaatgcctttgttcctgactcccgctgcccatatctgcctgtaaaaggtgcctaccctaaaaagcctggttcaagtggtgaaaccttctcagatcattccaagtacaattagtctttccttctctctcactgtcttccgtggcttmatattgtctttgtcagagcattgaacaaactctgtgggagctctccatttactggtttactcactgtcttacctgttggactgtgagtgccttaaaggccccatcatgaagatcgggctaatccctgagacccagagctcatatcctgattcacagagtaggagtcaaaaagtatttgttagatgagtgaatgaaatattaactctttggctgcttatcttctttctcctcctttccttccctcctctctagtttttcatcattgcaagtgggaaagtatggcctagagatttagatttagaatcttcctcataatatagaaaaataaaataactttggactagaagtcaggaggtccagtctatatctgtcaccagctcactcactgtttgacccttggtgattaattttactccctagatctccatttcttcatctttccactggagtagggcattttaaggattggcatttatgataaagtagaataatggaaagaccaccagctatggagctaaatagacctgggtttgatctcagatatccacagataggaaataacttacactgtgtaagttatttcctatctctgaactttcagtttcctcatttataaaatggtaatagtgatctctactttgcagggctgttgtgaggaataaataaactggtagccataatttgaagttttaaaagcacattttgtagctacaaattataccttcttctacctctgaggtccctcccagcaaggacatttttttggccactgggatcttcccaacctcttcactggcactccctgctttcagtgtttaatttaggccagtatcgacgagaggcagtgagctacaagaactatgaattctttcttccagacaacatggaagccctgcaaatcaggaagtaagtacccaatattttaggaacctgtgctgtctcatggctgaaaggcccttgttcagatattgggggagtagggcagaataatctggaccagaaaggaggccctctagactctcaaacagtagttggaacagcccttccattttcctgcccaaatcctgtttctggtcaagaataatctggaccagaaaggaggccctctagactctcaaacagtagttggaacagcccttccattttcctgcccaaatcctgtttctggtcataaccatccacttatcaagaacctttaatggtcttctacttctgacaggagagagtagaaacttctcagcttagcatttgaggcatgaatctcaataccttggcctactctagtttctgtagtctcatcagttcaacctcaaggtctctctgcactacaagactctgagtacttgcagaatagagcctgtgccttatgccttcattatagaacctggcagtgagtaatcactaaagagatttttgctgaaagcataaatacattgccactgtcatgcctgtgtgttacccatgccaggaatgccttttacttcacagaccacatgctctacttgggtccataaaacagttcagcttgagttccattagctcaagggttggagcccttaatattatggcttctgtcattgctcagcttttcctgattgtgtcactttatacctgcccgtaaaccgtgtaagctgtgcacacatagccactttcaactgtttgacccctctgtgcttagcacggtgcctaaagcgtagggcaccctgtgtagatgttcaatacatgataagttagtctaagacatgagagatggtacagaagatactgcagacaatgagagagaaatccatcctgggggataagggttgcctctttttctttcctggtctatttcaggcagtgcgccctggcagccctgaaggatgttcacaactatctcagccatgaggaaggtcatgttgcggtaaagaaattttttattttttccttgggtaactactgggaagggaattagctaatatgtactgaacatttaccaatgtgtacagaacattatgttctgagtatttgcatatattaataatttaattttatgctccccccttgagataggtgttgttattatgccccaattcagagcccagaagaatggttcacagagacattaaataatttcccaaggtggtacaacgtatacctggcagggccagaagtggaatccaggttgcatagcttcagaatccccgctcttaaccactatacactaccagtctacccccaataattcagcaggactatattagaatttaaaactgcagtacaaacagttttgagttatagagacttacctaaatatctagtcaatattttggctaggatttgcaaattataaaaggggaggagattctcaaatatgcaaatggtccaatctcaggtgctgaggttagggaattgtttcctgttttagaggacttctaaagtgataaggaaggaagaagcttcagctaggaattgagagaaccagttctagctctgctctgtcagcaactctcggtgactttggtcaagccaacttcttctaggcctcagttacctcacctataaaatgaccctaataaaaacccacaatttcctcttgccttattacactcacagggtagcatacatttctggacagaccataagggcccaatatgtgcttgtgaaattgtcataagccaatcatgaatccttcctatccttcaagaccttgttcaagttctacctccatatggaagccctccacttagcacagggatgggcaaagagtaggtgttctgttagcaccagattcagagtaagccaatctcattacctgcctctaggtttttgatgccaccaacactaccagagaacgacggtcactgatcctgcagtttgcaaaagaacatggttacaaggtatggtaacactccaactcttatctagagcctatttctccagcacaaaccccaaagaaaggcaaaccaggggactcagagcggccaaatccgcaaccataagctcaacattttaatttggttctctaactttccaggatatagtcagaagcagcaaagcagaacaagaaaggaggggtgccacattaggcaatggaagttgactgcagacaggctggctatggggaaagagtggagagagtcactacaaaaaacttatataagacctaaacccagtaaagatataaaacaacagtctggggtcattcagtttagagccaatttgcctcatgaaactcagaagcctggaagtaccactgtatgagagcattatgttgtcagagatgcccctggagatgacttagagccattgaaaaggagtaaagctatgttcagctcctaccaaacataatttcctgctggaaatctcttttctgtttcttttataggtgtttttcattgagtccatttgtaatgaccctggcataattgcagaaaacatcagggtaaggaccaccagttacttttccactttgctctgccttaggcttagatcatgcctaaggcagaggtgagattatgcctaaggcaactccatgagattaaagaaagtattcctccctgatcttctctgagttttcataggaagcattccctaaccatcctggcttacaatgactctattaattttaatgaagccaacatatatagtgccctttgtatgctccagatatcaaacttgactgtcattaattttcacaacaaaactgcatattagagattatttccatgttagagagaggaaactgaggttccaaaagcataaatgaattgtcaaaaattcatacaaagggatggaagtgggactggacctcaggcttggctgtctgcctcaaaagcctacattttttattctgccccaaaattcataccagaactatcactgctcttagattctagacatgtggtctagaactaggtcatttaccacattttgttgttccctacttcatcaaattactggagctcaagaacagaagagaccttaagggtaattttcttctaccctccatcagatacttgaaatcttacctaaatgtatatctatattttctttttatacctgcaatgacaaggggcccattgctttcaacaaatgcggtccagtcaagctggaatctgcctccctgtaatttttattaataggtcatttttttaactttttgggacatacagcatgtccatttcctcccttccttcttcatcctcccatctatctatctatctattgattcaatagaaattgactatatacctggtcttggccattctgggcattagagacatatatatggatagtggagagtccttcccttgagcgcacagtctagtaaggaagactggcaagtatatatacagaactctgagaactgaggtgagatgagggaacagaggaactttgggaagacagtgctgagggcctaactttgcatgggggcagaaatcagggaagccttcctaatggaggtaaaattaaaatgaatggtaccttgaagaacacataagaatttggtgggtgaagaatggaaaataaggatataagcatatactaagtatggcatctccrgagaactataagtagcttaaattggctaaagccaaatgtgtggaggaataagggagccatgggagataaggatgaagaaataatttggggcccaatcatgacaagccatgagccacctgctaaaataattcacacttttttctaaaaggtatgacaaaatgtagaagggctttaggcaggagaatactttggccagatgttcatattagaaatacccttctggctgccagtatggtgaatacattagaactaaaaagaatatagacaaagtaattgggcacaaagctatagtgagcacaagcaagaaagaatggatatttagaggagatgatagagtggagaggatttggtacctgctaagaggtgagggatgatagaaagacagacatctaggatgactcccaggttccatttaggatcatatgactgggtaggtgatagtgccagtacctgagatgaggactgtgggaggagacgtgggtattggtggattaggagaggccagtcttcagaaatccaaagacagcacatcataatctcccggtaaacacttgatacatgtaagtcataatgacccctggccaagatctctagttcctcttcttcagccatttctcatatcacaatttctggtcctcttataaatgttcttcttttataaggagtgtattctctgggactgagtataatgtaacaggccttgtttgagattaggaatgaggagtcacacaaccagcttcttttcaattggctgatttttgtaaacttgggcaagatgtgttctccaggtctcaatttcctcatctttataatgaggcatcttgtactcaatggtctctaagggaacttccaaagaaaaccatctgtctcccaatgtctcccttgatacctctgttctccctgctcccagcaagtgaaacttggcagccctgattatatagactgtgaccgggaaaaggttctggaagactttctaaagagaattgagtgctatgaggtcaactaccaacccttggatgaggaactggacaggtaagagccagcaccccaaagtcaaggtctagatctttcacccagttttgatatcctgtagaacctagagtaaatatcctcccttgctgggcctcaacttctctatctgtaatatcaggaaactgaacttgatgatctttcttcaaggatcctttcagctctgattccttgatgtgtaaggtgttcctaagatgactaaartagtgctttcctgagcaatatgaacagttcaggaccctgggaacaaatgcccccctcctgtgggtgttgcgattattattacaaaagtgttcttcacacgtgaatgacacttcagtttccaaacatgtataccttctttcttacatttaatcctctaggactcctgtaaaggaggctgagataagtcttatggtcataaaatttcaagaaaaagaaattgagtcttagagagttgaaattactttcccaagctcccaccacaaggggtagagctaggattctaattacatgttctgtctcctagtcatgtctcttttcacaacactcccatgtctcatcaatcaacaagtatttggaccctttgggctgtggtatatgtagggggtataaataggggcaaaagaggtgggttctatcctcgggtagcttctatagtgctttgacatatgagaagacccataaaaaaaaacaagaaatgttctgtcatcataccaactaaagataggagagagcagatgtgagttttagatatagaatgttcccagaaccctactctctttgaaaatgtattatgatgagaagagaccccaagtgagaagtataaagaggcttcaaatggtcatcaccactctaagaaatctaaagagtggccttacccaactgaagtaccaagaaatgagcactgttactgccccactctttagatggaggaactgagacccagatcaagtcaaagtcttaccttgggctacacaatgaatgagtcagtagcacaatatatactcgaacccatatcccagttgtgcagattgttcattgtacaggcaccctggtcaagggtacactcgcttctctcaccaagatgtgtgctgaagtagggctgtgtgaccctgaggaaagtacggctttttaaaattatcacaaaggcacaatatgggctaacagcatatggtgaaaggagcctgaaggccggggtgaaggatgtaagtgaaagaacggcattgacaaagccccagccctgggcctagaccctgcagttgctaggttgctgtttgatgaattagtttgggccagaagaagacagatctagaaggtcagctttatgtcatcatttctccatcaacagacatttacagtctatgcatcaggtcccagccctgaacgtggaatcaaaagaggaaagggctgtccctgatttgacagaatgtccagttagttggagaagacaatgagtacacagttggtcacaactctggtgacagtaaaccaactgggctgtaggaacataggacccagtccagcttagaggaagaaggtctaaacgagctggattacccaataggcagactacactgaggttaccagcaagataagggctaccaaactaagaaaaaaaactatcttaaaaacttttatttatttatttatttttaatttttgagacagagtcccgctctgtcacccaggctggggtgcagttgcgtgatctcagctcactgcaacctctgcctcctgggttcaagcaattctcctgtctcagcctcctgagtagctgggactacaggtgcccgccaccgtgcctggctaatttttgtatttttattagagatagggtttcccatgttggccaggctgttctcgaactcctgacctcaaatgatctgcccgccttggcctcccaaagtgctgggattacaggcatgagccaccgcacccagctggcttaaaggcttttataatattgactatttcaaaaacagcatcaaggtagtcaaagtggaaaaatataaaaccagaacttgggaggacctccccatattctgtagtttataatttttattttaaataaaaatttaaaaattttttaaaaaatttttaaataaaattaaaagtttggatgagggtaggcattagctactctgctatttttggtgtggaacacctctaaatgacttcacatgatcctggtctcaaaaaagagagtgaatatgccggctcttgaggtataaatgcatagcagctcaactttggaaatcgggcaaagagaatagcactttgtaagtgcctagttaaatctgaacaagagtagagaaatacagaaaatattccaagagtaatagcaaaggtatgaagacaagaatgaaacagagaagatatgggtatgggcatgggaccataaagtgaggccaactgggctcagtgtgagaaggcaaaaccagaagatcagactaagctgaggaatttggaagctcctagagcctcaaaggacctagtgttaggaacagacagtagccaggcaacaagtttacatcagatattttctatccctaggctctgagggttctagaagaaatgattggagaggggagcattctggggttcttcttcccgagaaggtggccttggagaaatcactttctctctctatgcctcagtttcttcatctttgaaacagaggtgataatctctgctctgtagcaatattatgaggattcatgcgcttaaaagttcccactccctgccagatgcacagaaagtgttcaacaaatacaagtgccctgtggaagccattaggcacagatgggcatgatgagtgtggtgcagccataaagggcttctctaggaagaactagggagaggctttctgaaaccaaacctatcagcaaccttacctgcctggagttagtgcagtgcagctctttccattcactcggttttgttaccatgcaaccagggctgctggtgtcaccccattgccccagccttccactcctcttcccagggatttctctgaactctgtacaggccaacaactaaaggatttaatgcctggtacagcgtaggcctcagaagtcttgctccatgtttctagtcttctgattagtcagtgcctatactccacccttcagcttctacacaaacaggtggttgaacagtttaaatatcattcagtatataggtattagttcatgacagagcacagaattgaggatacagtaaggaacttgggacaaggaccacaagttccccaataatgttgtggaccacctctgtatccccatgccccactgcttggcacaccttagagggagtgactatttatggaatgaatgttgagcactgatcatgtgtttccaagtatttgttcctgactggccagagagctcccaaagcacagacagtgggtctccatgccaagcacaatgcctagaacagaggagtatgtttggagtatgtttgttgactgcatagcaaataggaaaataacccaggccaaccccacttctgagtgaggagagaaacacacacatgcacagacacacatatgcacacagaggcaatctggtagctgtgtgtagagtataaaagacaatatgtagcagaggctaaaaaaaaaaaaaagaggagtgaagagctcaactcaggatcagaaagggtagaggagtgaacaagtcaggagctgccagtaagacattggagctagccagggatgcaaaggatactgcttctctctgactatgttaggggtgtgaaccacagaagagagaacccagctgcctgtaacaggatgagtgaaggtgaaaaggcagtttggctcaagttgaggctgaaggaaggagacagggggaaatggtagcatgcaatgagctcctttgggtggccaataaccaagtctctaggacaggtactcggtacagggcaaggcattgcatcacattaggtgacagctgggttgtggaagaggtttgaaagggtgtgtggttcggggtttctctcggggtcaaccctaccaccattagcccctgagctgcccttgctcctgcttgggtctggcccagccacctgtcctacatcaagatcttcgacgtgggcacacgctacatggtgaaccgagtgcaggatcacatccagagccgcacagtctactacctcatgaatatccatgtcacacctcgctccatctacctttgccgacatggcgagagtgaactcaacatcagaggccgcatcggaggtgactctggcctctcagttcgcggcaagcaggtagggtgggccacacacacccagatgggttggctgggctgtcctaggtgggctgcaggtgtagtggtggccacattctgggtcctgaggtggaatgacccagggatgggggagaagcagattccatcactcctgctcttccacccatcagctgctcagtctggacccagccgccgaatggctcccaatgccacctgttctgcaggtctaagagcttggccctggcacccaaggcctgcccaaagccagctgctccatgacagtgactcccttggccctgcctgactggttccctcatctttctcacgagtttgtgcctttgctagtgcagcttccccacctggtctaccctcttctgtctcctctgtcagtgggtgactgtcagtggcacatacagctgccctgagagacccacccttgaatcactcttcttcccaattctgccctcccgaccttatcccaacgcaggtgtcacactggcagcccctgtccccactcatgacagtgtccttcctgccctccccactcccttccaaggcccagcacctgctccaggaagccctccccatcctctcctccctcccaggcaggttgccatgccctgggctccagctctcccagttctggcctatgtgtggctctcctggcctgagtatcttctccccagcccggcacagtgacctactggctggttgctggctgaatacagggatccatttccacagcatttggccctgtgcctgggcttattagcacaggtattgttcctgctggcaggaccgcttggggatggaacaggtgggaaatgaagtgcaggaaggacagttgttgtcataattgtcatttattggacacctatgcacagtcacggtgccatctgcttccgcatgtgtggctcatttcatcttcaccacaggtctgtggggtgggcattcctgccacaagtttatggatgaagaagcagagagcagccccagggcaggcggccaggatgagacagagccaggactgaaagccgggcctactggcctgccctcagctcccccactggagatggggggaggtgccccaggcaaggcactatcctggatggccacaccctggtgtctccctttctgttacctccagactgacagcctcccctcgaggtagacgctgacctgtgactccctcatgtcccactcctcagagcagagtcagaggctgctcgaggtgtgaccccagcccatggcagcccctgcagccagggccctcttgggtggagccagcccggccctgcccacacagctcggagcccagctggacatgtggctgtctccacagggcacgcctccctgcacacaaacctgtgtgtgtgcatgcacacagctggcgccaccttgacgcttctcacagagcaccaggcccagtttacaaagcacctccccgtcgaggtagctctcacttgcgcagcacccactgtgtaccaggctgtggtctgggtgctccccatccactatctaaagtgcagcccccagacagcaggccagatgagacaatgctctttggatatgaggccagagaggggcagggatgtgtccgagggcacaagggaccatgtaagggagctgagggagtttaacctatggctcatacctccctgtcaagggctccttccaccagagcacgctgactcctgactcaggtccataatgaaatgtatgtatgaaacgcctatagctgcatatagaaatgtgtgcctggaactttgcacctgtgcagatgttcctaacacatgccgtcagcagttaacgacacacctatacacagaggaggaaatcactagctcctctgggctcccacagccctttatggttcccctcggtgctgccagtgtttccctcactggactggccatgtcttgagaacaagaacaccccagcacccagcacagggccacgaacactcaatacrtgtgtgaatgcccttagaacctgggtaccaggaaccctgcttaagcaataagtgttcacagtgtcaaaaagtaatgtctcccaaatcccacaacccctacttccagtccatactctgggtaaccccaaacctagaattctttgccctttttgtctagagtccgctttcagtgcctacatgggcctatcagtgcctacatggcctgtccacttgaggtcaggccatatcacacgaccaaggggttgctgtttgtggagcatggggatcagtggaggtggaaatgtggacagaacttggtcatgtgacttggttatccacaagcatgtactaaaggcacgtagaagtgcaggatagagccagaaatggagagatagactgtgcatggagtgcctccattggtactcttgtcccaggctccacaaatgttagaggtgggcctgtttgaatgaatgaataaccaagtaggggcttcggtgagcaatcgtcaaataagcgctctctctctctctctctctctctctctctctgtcatgctcttttctattcccttggcccaccatcacattggaaagagtatggctttttataagtttggaacatttaaactctttgctctgcttgttcatcaccactcaatttgtggcagatctgagcttgttctgatggccaccctgctctctctcacctctccttttccccttctctcctcctctgcatccccacatcctagtatgcctatgccctggccaacttcattcagtcccagggcatcagctccctgaaggtgtggaccagtcrcatgaagaggaccatccagacagctgaggccctgggtgtcccctatgagcagtggaaggccctgaatgagattgatgcggtgagatgcatggggtgaatctcctgtgtgtgggggtgacttgagtctgggattatcccctgggttgcctctgctccagcccctatggggagcctaattaattcaacaaacttttttgacaactagccatgtgctagaccttattctatgtcttggggatccagtgaaggccagaatagacaaagtctctgccctcatcctaaagacagacagtaaataggacattacatctcagtgtgacaaaggrctatgagaggagaagtagaagggattatggaggatcagagggtaagggtgctcctgactcaacttggtgctggggaatttacaaggaaagcttcctggaggaagctagaggtgatataagaaggagatgaaatggtctggggagtggggaaataaatttaattcagagacagaaaataactcatgtgaagacccagagatgagaagagagcatggcaatttcaggggattgaaggaaagaatagcacagaggctgggacagcaatagtgagatctgaagaaaagggagatgaggctagaaaggaagccaggccaccaggctttatagttcatgttgagggattcaaatgctgcccaaacaacaatgagatgtcattgatggggtccacatcaagtaggagtaatctgaatgtgttgcacatttttcaaaaaagcccactctgggcatgtgtggaaacttggtgggaggaaggccagaatgaacaagtagaccagtaagaagttgacttcattagtctggcaagaggtgggggcatgttgaaccagagtagtggcatcggagatggaatgaagaaggactttgggaatgtttcaaaggtggaatcaggccaggtgcagtggctcatacctataatcccagcactttgggagggctaggtgggaggatcacttgagcccaggagttggagaccagcctgagcaacatagtaaaaccccatctctacaaacaatttaaaaattagctgggtgcagtggtgcatgcctgtgaccccagctactctggaggctgagataggaggattgtttaagcctgggaggttgaggctgcagtgagctgtgatcatgccactgcactccagcctgagtgacaatcaaggccctgtctcaaaaaaaaaaaaaaattaaggtggaatcagcagggcttgctggtgcactggctgtaagggatgagggagagggagacatgaaggacccaaccctggtggtatagcagtctctcttcagggtcaggttcttccatgagctctttgagaaaggagctgtttcctctccattgttcacctgcactgtaggtacaatggcactgggcagcagtgcacaggttatgattgttaggcgtcaacataaaagcttcaccacttgtgtaaataacttgcgtgtgggtaggttaacttacttgcctgctagatatgcctctatagaaacagacatatatgtgtgtgtacattcatacatatgtgtatataaatatagaggtacagaaatacacatagttagaaaagggctatacagcattgttctgtataccacatacatttgctgtaaaatatatgcaagcaaatatgaaatttcttcatcataagtttggtggcttcttatttctggcccacatgtggtataaacatttattgaacccctccttgtttcaggttctggagtgatgctggaggtggaaattgatctaattcattcctgtcttcactgaattttcaggctaaatagggtagacagaggaataaacagagaaatagagaacagcatgtgtgatacaggctctgataggtaagactatgggtgcatagactttggggcaggacacctaactcagccaagatctacctggaagaagtgatacctagctgaagcctcaggtttgagtaacagtgaaccaagtagaaaggatcaagaatgacattccaggcagagagacagggatagggagcttcataaacaaagagggtattgtatgtgtgtggaaatgctaaggttgtagtagtacaaatggagaggctggaaaaaaggaatccatttgagagagctttaggaggtggaatctcaggaattggctatgaggggtgagtgaggaagaagcaagaatttaggatgaagataaagcaagaatttacgtttctggtttattttccatgagtaataaaatattaatacttcattctaatgattgagtctttaaaatgtcccttgcgcattctgtactagtatgttttacttacattttcccaatattcaaaacacttctgtgaagtagttctaattctccacattttgcagataaggaaagtaaaattcggagaggttaagcaatttgactcaataaggagtcaatgaccatttccataggcgacaggctcctagtactcctcagaatagaaagttgaagccaatcttgaacgacctcgtgtacccagtagggtgcactttcttccatgggcagtgtgggttggagaagtttcacactgcagagatgtttgtgggttggggtaggggttcacttcctcacccctgatgggggcatggtagatgggcccaatagacaacaaccagaggccactggccccctacagggagatttaattggaatccacatacccagaaggaaaccttagaaacccaacatcactttccaccaccagcagcagtcacctcacctctgggagtttctcagtagacttggaatctctcataagctccttaggaactcattctctgagtactcaattccttttttgagtgaggagagtgtatctcccccaaatccactctgaaaccattaggaatttgttaatttttcctgtctgagatgtctatggatgcctgtttatctgccagagttcccaaagtagaggtcttcagacacaggcacacagatactctcacatatacaccagagacataatgagggacatatacattaacagacacacatgccacagacacactgagacctgcatggaaagaccacatggacacattctcagatgcttagacaccctatacacacacatacacacacacacgcaagcacacaacatatgctgagacaaatacacaaacacaaggcataagtctttaaacataccacaagtacatatcataagcatgctgcacacagacttgtaaacacagccacaaatccttatgcccatatatttataaaaatacatacttatatgtataatgtacacctacagacctatctgtacaatcatagaaaaacatcatacactcagcctgaacacatctaytcacatacactcactgtcacatctacacagccacacacctcacacacacacacacacacacacrcasacacacacacacacacgcatacacacttatggacaacaggcacaaacccagagctgtgttcacagagacccaggtgctcatgtgctactgtttcacaatcatcgaagaattatggcaaagactctgtggaatttcatcttgtgaatactttcgcccccaaatactttttctcagggtgtctgtgaggagatgacctatgaagaaatccaggaacattaccctgaagaatttgcactgcgagaccaagataaatatcgctaccgctatcccaagggagaggtaaggtttgcggggtggcctaatgcctaggactactccccagtgtcttcattgcaactgctaggattccacaattgtctagacagctttagaaacagagtaagcatatcttgcagcagctgccatcccacaaggcacatgattatctggcccttggttgttttagattcttggctataggcaatagatccatccctttcttttaaaagctacataattttcttgcttattctctttctgcttcagaagtgctgactttatcctggaccttgtctctggtatcccttcatgaagacactttaaatagttcaacatactctgatttcctgatattttgttgccaagttgcctaaagctccagcctgtctgggcagttggcattgtcccaagggacaatggctaataatttaatcaacttctttgccactacatgaaccagaccatcagttccctatccccatatgagatgaatgctcattgcttttaatcaagcctccacttaaccagttccacattttagagcatttattagtcatactttatttctgatataaatggctgggaaaagttattagaaaagaaggacatctgggaggataaaacaatagatattctattcagttatacaacactttcacatttttaatcttcacccacagagatgacattataaaattcatcttaatttgccctcattttcctttaggtatttagaggctatgttattagaggtatacaaaattaaagcaattatgtcttctcagtgaattgcacattttattattacatagtgaccaaacctctttctcctcgataatcctttttgcctaaaaacgtattttatctgatattaatatagctgtacaagattcagtgacttctggtgactccttacctagttcacttttagctattcatttactttcaacttctctgtgtatctttgttttgtgtctcttataaacagcttatagttgggtttcgttgtttttaatccaaactgaaaatatatgtcttttgaatggtaagtttggtatatttacttttattgtaattactaacttttttagtttattactattatcttgtcttgagctctctgcttagttttttctcttttcctgccctctttaggattgataaagtttttatatccatatttaagttatataatttgtttccattcatttagagattacccttaacattttaaaaatttttcatcatgattctttcaatttttagttgatatctcaataaggatgtaaggtcaaaatgtatttcaaaatcactcataataattttttgctgagtgctattatgcaaccaacttgaatccttaacattttaatattcattattaacaaaatctaaaatcaatatctctaccctctacctaaacaacagaagaactttaaaaccctggccattgtgtctcctaatttacatgttaattgtttgtattttaggtcaaacttggtcttaacccccaagtgaattattcctgttgttgttattattgtatgcagtcaatgtttatttagatttaaccacatgcttactaattcctctgatcattcttgccccttgcacctcaaatcttccctctgagttcattttccgtctttcttttttatttttatttatttattttttattttatttatttatttatttatttattttttgagacggagtctcgctctttcacccaggctggagtgcagtggccccatctcggctcactgcaagctctacctcccaggttcacaccattctcctgcctcagcctcccgagtagctgggactacgggcacctgccaccacacctggctaattttttgtatttttagtagagacggggtatcaccgtgttagccaggatggtctccatctcctgacctcatgatccacccacctcggcctcccaaagtgctaggattacaggcgtgagccaccacgcccagccttccatctttctttagaagcttttttagtgagtaaacacacccttctttttgtctaaaaatgtcttggtaggagggggtcctcaatcctagtgatgcttggctgggtaaaaactctaggatgacagttgttttctctcagcactttgaaagtattaccctcactgtcttctggcttctactgtggctaggaaatctgctgtcagtctagttttctttcctctctggctacttttaaggtttttgtatcattgttgctttaaagtttccctctaatatgtctagatgataatttcttttcatttattaatgtatagcttgggattagtgagacttcctgaatctgaggactgggattcttcttcaagtctggaaaactctcagacaatttatctttaaaaattcatctctcacattctattatcttcttctggaaatacaattggatgtatgttactcctgcctctattcttcatgtctcctaacttttccttcctattttctatctctttgtatcttttgctgcatcctgagtaatttcttcagctttatcttctagtcactatttaagtagtatccaatatgctccttaccccatacactgagttttcaattttaatgactattttttatttctgaaattctatttagttatttttcaaatctacattgtatatttgatggcatcttgtttcttccttacattttttattccaccttttatttctttaaaagtttcaaacatatttattttatattgtggcatcccttatcttaagtttttagggttctcttcttgtttctgcttattctcactcatggtagcttatttccttgtgtgttatatgagctccagcttgtcaagaatttatctatggaaatctcacgcagcctgagttgagagaatccagagagatttcatttgcttcttctaagcagtcctgggagctaacgacttgggatcactttttattaaactctcagcataacattcttcaaaccaaatggatagtgtagctctgaatcaccagcccacctgagggaagtctggtggttataaattcttacaggatttttttattataatttaagttttagggtacatgtgcacaatgtgcaagtttgttacatatgtatacatgtgccatgctggtgtgctgcacctattaaatcgtcatttacattaggtatatctccaaatgctatccctcccccattcctccaccccacaacaggccccggggtgtgatgttccccttcctgtgtccaagtgttcttagtgttcaattcccacctatgagcgagaatatgtggtgtttggttttttgtccttgagatagtttgctgagaatgaaggtttccagcttcatccatgtcactacaaaggacatgaactcatcattttttatggctgcatagtatttcatggtgtatatgtgccacattttcttaatccagtctatcattgttggacatttgggttggttccaagtctttgctattgtgaatagtgccacagtaaacatacgtgtgcatgtgtctttatagcagcataatttatactcctttgggtatatacccagtaatgggatagctgggtcaaatgggatttctagttctagatccctgaggagacgccacactgacttccacaatggttgaactagtttccagtcccaccaacagtgtaaaagtgttcctatttctccagatcctctccagcacatggtgtttcctgattttatattgatcaccattctaactggtgtgagatggtatctcattgtggttttgatttgcatttctctgatggccagtgatgatgagcagtttttcatgtgtcttttggctgcatagatgtcttcttttgagaagtgtctattcatatccttcacccactttttgatggggttgtttgtttttttcttgtaaatttgtttcagttctttgtacattctggatattagccctttgtcagatgagtagattgcaaaaattttctcccattctgtaggttgcctgttcactctgatggtagtttcttttgctgtgaagaagctcttgagttttaattagatcccatttgtctgttttggcttttgttgccattgcttttggtgttttagacatgaagtccttgcccatgcctatgtcctgaatggtaatgcctaggttttcttctgggtttttatggttttaggtctaacgtttaagtctttcatccatcttgaattaatttttgaataaggtgtaaggaaggggtccagtttcagctttctacatgtggctagccagttttcccagcaccgtttattaaatagggaagcctttccccattgcttgtttttctcaggtttgtcaaagatcagatagttgtagatatgcagcattatttctgaaggctctgttctgttccattggtctatatctctgttttggtaccagcaccatgctgttttggttactgtaggcttgtagtatagtttgaagtcaggtagcatgatgcccccagctttgttcttttgacttaggattgacttggcgatgcgggcccttttttggttccatacgaactttaaagtagttttttccaattctgtgaagaaaggcattggtagcttgatggggatggcattgaatctataaattaccttgggcagtatggccatcttcacgatattgattcttcctacccatgagcatggaatgttcttccatttgtttgtatcctcttttatttcattgagcagtggtttgtagttctccttgaagaggtccttcacatcccttgtaagttggattccttggtattttattctctttgaagcaattgtgaatgggagttcactcaggatttggctctctgtttgtctgtttttggtgtaaagaatgcttgtgatttttgcacattgattttgtatcctgagactttgctgaagttgcttatcagcttaaggagattttgcgctgagacgatggggttttctaaatatacaatcatgtcttctgcaaacagggacaatttgacttcctcttttcctaattgaatgccctttatttctctctcctgcctgactgccctggccagaacttccaacactatgttgaataggagtggtgagagagggcatccctgtcttgtgccagttttcaaagggaatgcttccagtttttgcccattcagtatgatactggctgtgggtttgtcataaatagctcttattattttgagatacgtcccatcaatacctaatttattgagagtttttagcatgaagggctgctgaattttgtcaaaggccttttctgcgtctattgagataatcatgtggtttttgtcattggttctgtttatatgctggattatgtttattgatttgcatatgttgaaccagccttgcatcccagggatgaagcccacttgatcatagtggataagctttttgatgtgttgctggattcggtttgccagtattttattgagcatttttgcatcgatgttcatcagggatattggtctaaaattctcctttttttgtgtctctgcctggctttggtatcaggatgatgctggcctcataaaatgagttaagaaggattccctctttttctattgattggaatagtttcagacggaatggtaccagttcctccttgtacatctggtagaattcggctgtgaatccatctggtcctggactatttttggttggtaagctattaattattgcctcaatttcagagcctgttattggtctattcagagattcaacctctttctggtttagtcttgggagggtgtatgtgtccaggaatttatccatttcttctagattttctagtttatttgcgtagaggtgtttatattattctctgatggtagtttgtgtatctgtgggatcggtggtgatattccctttatcattttttattgcatctatttgattcttatctcttttcttctttattagtcttgctactggtctatcaattttgttgatcttttcaaaaaaacagctcctggattcattgattttttgaagggttttttgtgtctctatctccttcagttctgctctgatcttagttatttcttgccttctgctagcttttgaatgtgtttgctcttgcttctctagttctttcagttgtgatgttaggtgtcaattttagatctttcctgctttctgttgtgggcatttagtgctataaatttccctgtacacactgctttaaatgtgtcccagagattctggtatgttgtgtctttgttctcgttggtttcaaagaacatctttatttctgccttcatttcgttatgtacccagtagtcattcaggagcaggttgttcagtttccatgtagctgagcggttttgcatgagtttcttaatcctgagttcttctagtttgattgcactgtggtctgagagacagtttgttataatttctgttcttttacatttgctgaggagtgctttacttccaaccaggtggtcaattttggaataagtgcggtgtggtgctgagaagaatgtrtattctattgatttggggtggagagttctgtagatgtctattaggtccgcttggtgcagagctgagttcaattcctggatatccttgttaactttctgtctcattgatctgtctaatgttgacagtgggtgttaaagtctctcattattattgtgtgggagtctaagtctctttgtaggtcactcaggacttgctttatgaatctgggtgctcctgtattgggtgcatatatatttaggatagttagctctccttgttgaattgatccctttaccattatgtaatggccttgtctcttttgatctttgttggtttaaagtctgttttatcagagactaggattgcaacccctgcctttttttgttttccatttgcttggtagatcttcctccatccctttattttgagcctatgtgtgtcactgcatgtgagatgggtttcctgaatacagcacactgatgggtcttgactctttatccaatttgccagtctgtatcttttaattggagcatttagcccatttacatttaaggttaatattgttatgtgtgaatttgatacaggaggattttcacttatttcccctgagagccaaggagagacagacacattttcttgttgtttctttttgcttgttaaggaactttttctagtttgcacttagagcgtaaagatttggcctttgagcatctcagatttatgtgagagtctcagtcttaactccccaccttgtgcacacccaaggccttgtcttctacttccgtacggtttttaaaactcaaaactcttagttactatgattggcaaatgcctgcagggcagctgtggctgctacatccacttatcacttgtttttttccgtttttctctattttggggccctatatttataaaattttctttatttttgtgaaaggtcagcagtgcatttaagaagacaatttgcagtggggagttgtattgttgttattgttatttagtccactgtattgatacatttatttggtccactatattgatagcccccatttagcagataatgaaactaagaccctaagaaggaagtgagttgcctaaggtcatactggtgggtcaacaattgaactggcactggaaccaaatgttcttgattcctagtttagagttcttcccctctgggcaaatgtgcctcatcttcctttctcactcaagtatctctcttwcgtttagtcctatgaggatctggttcagcgtctggagccagtgataatggagctagaacgacaggagaatgtactggtgatctgccaccaggctgtcatgcggtgcctcctggcctatttcctggataaaagttcaggtactaccctcatctctgctttgggaatgtttgatggtatttgagacactgacaycaacaattagatatctatatcttagtagttaagagaagagtatctagaacaaggatgcctaggttcagattctttctctttcacatactagctgtactgcctttcacaaattwctttaacttctctggcctcagtgtcctcatctgtaaaatggggagaataatgatgaattttaaataacataagtaaaaagtttagaacagttcatgacacattgtgtgggctatatattaactgctattattagtatagtattattcttagctaacattttcaaagccaacgttaacagtctgcctcaatctggaaaagatgagctagtatttctgtgaagcatgctaccatcaggtgatagtagggcctttcatagcttcatgatcctgattacaagtttctgtccttgctataggggtaatttccccaagatagtgatgttttcattttaaattgtttttcaaatgataatttatttttaaaaaaatatrtaggcattgcatttacagagtatttacacactgactgcataggctgaactgcaaactggggcagctggcctggcaaaaaaaaaaaaactgttatatcactttcaggcatgagattccatttycaatgtggatgctgatgtgttagcatttccaggatatttttaaggtgtctcagagcaatgcaaaattatattcaatgtctacactgttttacagtcttggatcttttctacgatgctagtttgaaaataaagaacactgtaatatggagtcatccagaattggaacccagggcacttgagaacttgacattaaataaggaatttcctctgcctggtcctcagtttcctcactggaaataggtgataggatgtgcggtgggggtccttgcactggtagatttctctctgttcacatctttacttttcagggcaatgttttgagaccatgaggcaggtgctgtaactcccattgtccagatgaggaaatgggagacccagaaaggtgaagtgactggcacaaggtcatggggctcagagtgtgagggatagacattgatcccaggtacatgccagaggacttcccgtctcagacatgtgtggagtgctttttacacacaggctacctgtcctgggagccagacagggcagcactggacagatgtttctcacccccccacccaccccattacttaggtgaatgctggaacaaggcccagagagatgatgtgactgagaatgcagacccacagaacatcagggctggggcaccctcagagtacatctagtccaatcctgtcctgtgaaatgggaacactgaggaccagagagagaagagcccgggccaaggtcattagtggaggcagtggcagagctgggtcagagatctcaggcaagtcacttcccttctccgagtctgtttcctcaagtgtacaaggagggtgtacagtagtacctcaatctagctttaagggtgtcatgaggtagtgggcaaaacacccttggcccagggcctgatgatgacaaaaacaaggaggagcagcaggatggatgcccaggaaggaaaaaagccaacctaatgtctcaggaggctgggagggcagtggcagacctcagaaacctagggtggaacctgctgttgagggaagccatgagggtcggtgatcctgcaaaatgaagggaaatgggtagcgttatgtgcaggtgggcaggaaagtgggtgtcaggagagagtgcctagcaggtgggtttatcacccccaggacactgcaagcccctggatggcaggggcagttgacagtaggggccagtgcatgcattctggcctcacagggtcccaggttcaaggccttgctctgctgcttcctggctgtgtgacttgcggagagcattttccctctcaaggcctcagttggctgagaccatgaaatgggcttactgtccccacctcttgggcttgcctgagaaatggaaacatagacccagacaagaatgcatatgaatattcagaacaactttatgcataatgtcaataactggaaacaagtgaatgcacaaatgcttgtccatcaccaggcctgaggcagggatgatcagagggagcgggccaggctgggagaaggctgtgggagctgtccactgccacagcagggtctcaaaaaacacttgctgacgtgaactgtgggcctttgtggtgtggggtctgctgaaggccccaggcttggggcgggagagaagcctgcctgggtctcatttgtcctgtgagtgaggtggtggccgtctccagggtggccggcccaaccctcctgcaggacacccagtccagtctaccaccattttccaaggcattcctgcctccctgctctcctcctctcttcccaggtgctctcagtgctgcccctgcagggtgtggggagtgggcccctggtgaggccccaccacggcaaggggacatggaatggggagcatccagcaagcctgggggcctggggaggctgtgtcctggccagcaccctgcctctgagggctgcttcctgttcctttctagatgagcttccatatctcaagtgccctctgcacacagtgctcaaactcactcctgtggcttatggtaagtactcccaccctgatcaaaggacaggcatatagaggctatgagcatggccctagtgcctaccatttgcccagaagagtcctgcaggaggtttcctgggtgggtgtcctgcaggaggttcccttagtgggtggtgggggtgggactgatggtagtaggataacagggaaagagtaggatggtttctaaatctggggctggctctgactctgtgtctttgccagagcacccagcacagagcaccaagctgtggaagggggattccccaaaggggaccagaggaaaattataggttagggccgtattggagaaagagcacaaagaccagcctgggcagtttagggtctttcttgggacattagctatgaaaggttcatgaacaggggagggacagaatcaaatctattctggggtgcgaacagggcagatgacctactgaagcctggagtaaggtgcagtccacagggatgaagctaagggagcttccacaggcattaggccccctctgtcagccccaagccccaatgatgcaccctcatccgtcttcaggtttcctaaaactcccaggtgaacttccatactcctggtgttgccacaaccacattgtcctccagataaactttgcctggcactgatcgcccaaggcagtggccccaggactcttccacctcttcaccacctaacacggcttggaggatccgcagagctacatcaatattacatagatgagactgctgtcctgcggacctcaagagctgtgggcagccagagttcatctctcatctccatccccatttacaaatgagcacctgaagctcagygaactaagactgttaggggcagaggtgacaggataccctgttggctgcctcttaggcctggtgtcttccccacacatcacatagctgtctaaattctcctccatacaggcgagtcatgatctgtacacagtatgaagctggggrtgtggctggtgatgggggaggggaggtgatacctcagggaagacctgtgcctaccttgggggcctatggacagatggattgttcttttctaaggctgcaaagtggaatccatctacctgaatgtggaggccgtgaacacacaccgggagaagcctgaggtaggtgggggactccatggcccaagctggctgtggacacagcacatggtgaaagcaccttatccacagaaaggctgccccaaccccaccaagcctgggtgttttgcaccaacagatggagcaaacagcacccagaaatgcagaaaccacaacccagacacgaggcaccatggagatgcaaggctggggcaattcccgcctaaaaggcctcaggctgagattcccccaggcctacctgagggtcaggatccgggcctggctgaaagaggggagcctggcaatgaagacaagaggcaggggagaggttggggccctgcactgctgtctccttcctattaatcctgcgctctctcctcagaatgtggacatcacccgggaacctgaggaagccctggatactgtcccagcccactactgagccctttccaagaagtcaaactgcctgtgtcctcatcgccttccacctttaggaaatgctatctttgctcttctcctactctgccttggcctcactgaggcaccccacttccagtgaagaagtcctccgcaactcccaaacaagcctcgcttgctggccgcaaccaaggagctatctagctctggaggaaactttctttcttaattcctattctctgacgaataaagacttactgcctacaagaggagaggaggaggtcatggcgaggcttttccagttgttctcaaggtactgaccctaatcctgacccagctctgctgctgtgagggcatggaatgggtgaggatttcctggagggaaaagttctacagtagcacctccaaagatgggggagaagataggtgcctgtgagttcctgtgggccttgttccagcaaggtggctgtgggcatgacactttcatccttatactcagggaagaatctggcacttgagccaagtgctcctttcttctccaactcttgctgccatcctgagtgatttcactgtttatgtgaatgatccaaccaatactctggcctcacagtcccctgaccccctcaactccagtgatcatcttctccccttcaaccacctactccatggattttggtatcatctccctggtctgacttcttaaacgtaagcatccaactgtctgaccactgcccacccactaccccagtccttacaactctctgtcatccactgaatccctagcagtgtgcctccatacagtaggcatatatgtagtattttcttctttttttttgagacagggtctcactctgtcacccaggctgaagtgcagtggtgcaatctcagctcactgcagcctcaaactcctgggcttaagcaatcctcccacctcagcctctctcacaaggagctgggaccacaggtgcacaccaccatgcccggctaattttcaattattctgtagagacgaagtcttactatgttatccaggctggtcttgaactcctgggctcaagcaatcctcccatcttggcctctcccaaagtcctgggattacagacatgagccactgtgcccagccctgtagtattttttgaatgaacaatatttgttgctgtacagcatcaagagcagagtcctttgaatgctctattgtcccccaatctatccttagtgttctgtccctaactatgttggatactatgggccatctcttcagccactctccaggcagctaccataagccaggtaccagtgacccagtggtaaagagacagactcatacacttgctgcctttgttcccttgtccttccatcacaaccacccagcaagacctaaaccttgtataatccacctctccttttgttgttgttgttgtctactacagaagttgctgatccctgcttgaagcagatctatatttatctgcatccacagccacccttaagtctgttcaaagtcagggttgtcttctctggtaccctattccatcccaccttctcagggatgggctacttcagtcaattcctgactcttccatatctatctcctgttcctgttagcttttgccccacagtctatacaatatgcccaagttttcctctcctatcccaattaaaccctcccttgttcttatgtccacccctagtgacctctgcccttccctccattcttacaccagtgattcaaaatcaatctgtacttactgtccagaagcctctccgtttgccttctgctccaggctttccctctccatatctttcctcaacctgttatcctcttgcctgccatgctttccccaggcctctatcctgctgaaatcatatttgcctttgagccaaaagctggagacccacattctccaaagagctatgctgatctccagctcttctacgaacccaagatgccactccacaactacctaagcacattaaaagacagaaaaaactccaattcattttgcaaatttaatgtaactctgataccaaaatatgacagcacacagaaagcaaacaataaagcaggaacagcaaacagatttttccatcacatgacaccctcagctgattggccataactgccttgactgctgtgtggacaaagattccaaggatgtactttggctccatgggaaggactactgcaatttattagcggtatctgtaaacatggggaataaatctgaaaacaaaacaaataggaacacattttagcaccaaatacactgtcttctcataattccttaattgccctcacctttccaccctgctgtcctgccttagtgtttcttacaacatctcccagctcttgtacccatccctgtgggtcctggctatggaaatattgcagttacctgaaacctcactagccatacgagaagccacaggcaccaagactggcggctccactgccaaagccagcactggtgctcggtccaccaccaaagccagcaccagtgtttggtccaccgccgaagccagctcctgtgctcggtccaccgctgaagccactggtgcttggtccactgcagaagccaacaccagtgcttggtccaccgctgaagccaacaatagaactgggtccactactgaagcccgtgctggtgctgggttcgccagtaaagccagtgctggtgttggaaccactgccaaagccaatgatggtactcagtcctctgtcgaagctggcattaggcctactgccaaagccatcgctggtgctgaggccaccactaaagccagcactggtgccaagtgtgctgccgaaactagcattggtgcccagtccaccaccaaagccatcactagtgaccagtccaccaccaaagccagcactggtgcccagtccgccactgaagccagcactggtgcccagtccaccaccaaaaccagtgctggtgcctggtcctccaccgaagccagcgctggtacctagcccaccatcaaagccagaacttgtgcttaggccaccactgaagccagcactggtgcctaggccaccaccaaagccagcactggtgttcagtccaccaccaaatccagcattggtgcttaacccattgccaaagctgaaaccggtactggtgctgggtccatcacaaaaactagggctggtagcaccactaaagcaggcactggtgctaggagggccaccaaagcataggttagtattagatgcactgccaaagcagaggctggtgctgggagctccaccaaaacagaggctggtgccatgagcaccaccaaagctgacactggtgctgggagcagcaccaaagccaatgctgttgctgggagtaccaccgaagtcagcagcggtactaagtgccccaccgaagccagcactggtgctaaatgcaccgccaaagccagggttggtgattggtgcaccactgaagcaagcactggtgctgacagcaccactgaagctggcactggtgctgacggcacagccaaagctggcattggtgttgagtgcaccaccaaagccagcactggtgctgggagagccaccaaaacagacgctggtgcttagtgtaccaccaaagtcagtgttggtgctgacagcaccaccataaccagcattggtgttgagtgcactgccaaagctgacactggtgccaggagagccaccaaagcagacactggtgcttagtgtaccgccaaagtcagcactggtgctcatagcaccaccaaaaccagtactggtgttgagcacactgccaaagctggcactggtgttgagagcaccaccaaagccagcaccagtgctgggagagccatcaaagcagatgctggtacttagtgtaccaccaaaattggcactggtgctggaagagccaccaaaggagacactggtgctaagtgtgcctccaaagccagtgctggtgcagggagagccaccgaagcagatactggtactgagtgtaccaccaaagctaccactggagctgggagagccaccaaaacagacactggtgctgagtatgcctccaaagccagtgctggtgctaagcgcactactgaagactgtgctcgttgtgggtgcactgccaaagctggtgctagtgctgagtacaccactaaagccagccgtggtgctgagtgtgcctccaaagccagagctggctccaccactgaaagtggcactggtgctgagtggrccactaaaactagagctgactccaccactaaagctggcactggtacaaggcatgccaccaaagctaatgctggcttcactgctgaaactagtgctggtgctgkgtgcacaaccaaagctaatgctggctgcgctgctgaagctggagctagtgctcagtgtaccaccaaagctaatgctggctgtattgctgaagctggcactggtgctgggtgcaacaccaaaggtaatgccaggtccaccactgaagccaccactggagctgggtgcaccattgaagctaatactagcacsatcgctgaagccagccctggtactagctcctctgctgaagttgacgttggtgctggcatctgcattttcttgggctctggcctcaatttcaaatgaaaatctgctccaggcctgagmatcatcgcctaactcttcccttgttaggcagtcgatatccatgtcatcccaattccagggcccagccacagcttcctctccaatccccatttgggctcttgcctcagccctggcttcagcctcagccacagccacagctgcagcttggacttccatctccactgcctcgcggtactgcacagcccagtccttggggtctttcttctgcacctgaaatggggatgataatcataataagaaaacaaccctagtaatcatgtattaacctacgggctttgtattaaactagtagcaatacttttttaaacttctcagttattggggctctatcatgggtcagttctgaactccagtttcagctctgctgacttacgtgctatatgaccttggacaagttacttaacctcacttagcctaagtgtctttataattacaggaaatgatagagcgtaaatatgttatgaactgaagggttgtgcccgcccccaaattcgtatgttgaatccctaacacccagtgtgattgtacttggagatagggcctttatggagataattaaggttaaatgaggccataagggtggggtcctgatcaacaggattagtgtccttataagaagagacaccagaaagcttgctctcttctctctcacacacaaagccatgtgaggacacagcaagaaggcagccatctgcaagccaggaagagagccttcaacaggaactgaccctcgtggaccctgacctaggattctcgccctcaagaactatgagaaaataaatttgttttttaatccacccagtctatggtattttgttatggcagcccatgctgattaatacaaagtatgaagaatgaatgagatgatgtaaactatatatctagcagcaccctgggacataaaggaggctccacatgtttatatatgagctgcaggctgctctgtacctgcccatccctgtgcattgcctgccccagccaagggtatcccattgccttaatatgccaagctcgggcagctctcctcttaccctgcatgcaaacttgaggactttcatcttgctagtctcgtggtaggagcgcaagccccagaagaactcatattcaggtggtctgctgttagggaccctcttgtactccaggtaccttggaaaaaggaaatgaaacttgtttctaaccaagcaaccctgctgtctaagcactagacaccaggtggcaacctcctccaaacaaatacaaacagcccctggagagggatttctaagaccctccagccccagactcactaccaaacacagtttatggtcttggcctccaatactgagccatttcccactggccctgtgcaaagcagtcccttgggcttctccaggggagacatgtatagggcatgatgtcacaggaaggccaaagtatcatgccacctgtgaggagtaagcccagattcctgttgggtgtgttgtaaacagaggagccattcttaaggccctctgctctgagcgcaccccactgcaagggccttgtgttgagtctggcccagtcctggaaaggtctgcccatgggaattttagacagtatcagttctaggacacaggatgyccatccctctaaagctagtataagaaaggcactgactaagcactttctgaaccagatcagtatacccagaacacttcagggccagacaaagccccaaacaccacttacttctgcttcacaaactcgtctgtgatgagcttcctcacttccccaaagagtgaatgcctcaccctgacaatgggaaaaataacccatgaacacagatcagaactgcccagatgagggcagaggcatttcccaacatggaagagacct

SEQ ID NO: 94250 - DNA, 34465 bp, Homo sapiens
catttgtctgttttggcttttgttgccattgcttttggtgttttagacatgaagtccttgcccatgcctatgtcctgaatggtattgcctaggttttcttctagggtttttatggttttaggtctaacatgtaagtctttaatccatcttgaattaatttttgtataaggtgtaaggaagggatccagtttcagctttctacatatggctagccagttttcccagcaccatttattaaatagggaatcctttccccattgcttgtttttgtcaggtttgtcaaagatcagatggttgtagatatacagcattatttctgagggctctgttctgttccattgatctatatctctgttttggtaccagtaccatgctgttttggttactgtagccttgtagtatagtttgaagtcaggtagcgtgatgcttccagttttgttcttttggcttaggattgacttggcaatgcgggctcttttttggttccatatgaactttctcaatagatgcagaaaaggcctttgacaaaattcaacaacccttcatgctaaaaactctcaataaattaggtattgatgggatgtatctcaaaataataagagctatctatgacaaacccacagccagtatcatactgaatggacaaaaactggaagcattccctttgaaaactggcacaagacagggatgccctctctcaccactcctattcaacatagtgttggaagttctggccagggcaatcaggcaggagaaggaaataaagggcattcaattaggaaaagaggaagttaaattgtccctgtttgcagatgacatgattgtatatctagaaaaccccattgtctcagcccaaaatctccttaagctgataggcaacttcagcaaagtctcagaatacaaaagcaatgtgtaaaaatcacaagcattcttatacacaaataacagacaaacagagagccaaatcatgagtgaactcccattcacaattgcttcaaagagaataaaatacctaggaatccagcttacaagggatgtgaaggacttcttcaaggagaactacaaaccactgctcaaggaaataaaagaggataaaaacaaatggaagaacattccatgctaatgggtaggaagaatcaatatcgtgaaaatggccatactgcccaaggtaatttatagattcaatgccatccccatcaagctaccaatgactttcttcacagaattggaaaaaactactttaaacagattcactcttttacacttcataaaaacactataaagtagatattatcagtatcttcatattacagacaaggaaactgaaattcagacaggtgaaataacctcccaaagttcacacagttaataaatggcagaacccagttaatctggctcgagggctgatgttcttaatcactgttcattcttgcagtaacatttagaagaaccaagtaccaggatgagatctcatcttccataaagtgacggagcaagtaattccagactcttcctcctccctcaacatctacaaaactcactgttcctgaaatgcagtaaacatcttaagacctccctgattttgttgatattgtaccctctgcctggattgcccctttccctgtgctttatccagtaaactcatgcttcataacccatttaaaatatcatctgtgctctgtagtgtttcctgaaataccttagggacttttaaacttttttccttttgctcatattgctttctctgcctgctgaataggggattgagaaagaaaacacattcttctttaccaaaagacaaaaactataaatagttactagctgtattaagatatatgccaggtgtgatggttaatatcgagtgtcaacttgattggattgaaggatgcaaagtattgattttgggtatgtctgtgagggtgttgcccaaaggagattaacatttgagtaagtgggctggggaaggcaaacccacccttaacctgggtgggtatcatctaattggctgccagcaaatataaagcaggcagaaaaacatgaaaaggctagactggcttagcctcccagcctacatccttctcccatgctgcatgcttcctgcccttgaacattggactccaagttcttcagctttgggactcagactggcttcgttgctcctcggcttgcagctggcctattgtgggaccttgtgatcatgtgaattaatactacttaataactcccatatatatatacatgtatatatatacataaatatatatatgtatgtatatgagagttatatataaactcacgtgtgtgtgtgtgtgtgtgtctcctattagttctgtccctctagagaaccctgactaatataccaggaccttttttaattctcctaataggaagatattcctactaagcatatagattacttataaaaggaagagtatgagcctgacattgaacattttagctctaattataagtgttattaaacaatgaaataatatttataacactctgaggggtgaaaaactggactttggaattttatacctaaccaaaaatgataagagaattctctgtattactctatgatattttgaaaaatattgattactaaaattgatatgggaagaagttttttaaaaaacgtataaacaaattatcatggaaaccattggaaaagctgtctaagaacaacccagctaccatcaccaaatggtattagggcaaataattatattggctggtattaccaaaacttacaagaacagatgtgttatttaaattaaaatggaaactatagaccaatcttacatgaagaagaaaccacagcacgtctgggacatagctatcatgctactctctgagtttcattccagaatgtgggtaagggatatagctaatgaaggagagagatgctgatagtgagaccaacccttcaggaagtaacccaacaaagcctgtatgtcttccttaatccccactcatcacaagtggttgagactatcgttaactgggacaaccttttacagagatattggataaaatgtaggaaaaaatctttaaaagatccatatcctttggtcgaataatcccattactaaaaatcaatactaatatttgtggtgatggttgcacagttctgtaaatatactaataatcattgaattacacatttaaaatgggtgagttttatggtttataaataaacttttagaaaatctatgctaagaaaataacctaagatgcagagaaaactttaagtaccatgatgtctactgcagtgcaactgcaaagtaaaaagttgaaactcctaagtcaccgaagtctattcaatcaaacattgtctgaatagttacttattgtcaggttgacactggggttgcagaaatgaatcagacctagactctgattccagaggaattcccacatgggtaggaagtcagccaagacacagaacaaatcaatgcagagagagagaggggactatgtagagaagggccaggaaagtgtttcctttggacacgctacatgagcatatgggactgaaacttacttctccctccagactacattgcctcataaaaaggtgagaatcacacaaccaccacccaaagagaaaatgagacattttcctctaaaggagaggagatatcaggcacaaccacagccacctacactcacgggctcagctggaccaggaatagtacagagaggcaccacctaagtatccttcccaatgacctgggaagtcccacacactttcctccattagggcacttcgagtttttctctacstcacctcagaggtttgttaacctcagtagattttattcttccagttccttttctgggtacaggcagaacagagtagaaagaacggaggaaatgcatctgaatgcaacaggcatttctgacagcccccctagtcaatggttccagattcctgtcagcaagttgctcaaggtctgatgtgggaggaagacataagacaaggtgccagtagtacagtgtgataaattctgagagagaagatgtgggggcccagaagagggaacaagatccagtgtgggggtttaaaagggcctcccagaagtgatgacctttgagctcacttttcaaagtgacaaatggttagccagctaaagagttggaggtcaaggttattgcagctgcatttgaaataccttctagaagaactggaattaatctttagttttaaaaatggttaaatacaccatgctatacccatactctccaatttacatgccactgcatctccactacctagcaccacacctgacatgctataggcactcaataaacatttgttgaattaataaattaatccagatgaagcagcaaatatcacagaaaaggagttaatattaatattattcaaagttcttctcatctcatcctcacaataatccaatagggtaggttctatgactgtcccattttatatatgagagatctggagataagtgaaccaaatagctaaggtgttggtgacttggtgacttgggtgagtctgactccagagtgcatgcttttagtccactatattttactgccaacccacccccaaaatgggcaaaaagtagaccactcagaagagaaatagacaactgataaagaaacatgaaaagacacccaatctcattaataatgaaagaaaagcaaatcaaagcaacactgatataccatttttagtgcctataagattaacaaatattttaaaaattgaaaataacaaatggtattggtgagtttgtgagaaaatagatacacatttactcttatacaccactgggtggggaggggtgtataacacatgtataggacaaattggcagtatcaaaaactttaaatgtctattacctttagatccaggaatgcttatattttaggatgccaccctctaaaaaaatgctctcacaaatgccaaaagatgttcattgcaacattaatcataatggaggggggaaaatccttgggaataacctaaatttatatcaataagggagtgtttaaataaattacagtgcattcagattttgtaacctccatggtatattggcatatggttgaatgaaaaacaaacaaaaaaaagaaattgcaaatcaatatgtagactatggtcttatttatgtaaatataatattaatgatgacaatctgctctaaagatgaaattgtctggttataacatggtcctgctgccttaggattgataagggaaggggaaaaagagagtgacaaaaggggaagaaaatgaaaaagggaggagaaggtaatagaaaagataagacagagaacttcacatttttaattgtatattatgagaggaagagaagagtgtgggttctgtaactacattgcctaggttcataggcgggctctgtactttctagttgggtaattatcaacaagttacctcacctctctgagcctcagtttcttcatctgtaacatagggataatagtacctatcttttaaggtccttatgtggctaaattaattcatgtaaagcacttagtgaagggtctggtgcattgtaagcactcagtcaacagtaggtgttatttatttgggccaggcactgtggtatgcgttttccatacatgatattaccaaattgttacaacaaccggggatctagtctgtggaagctgactgtttgagctcataagcacaacactgtattctaggtctgactccagagccctcccaacttgtgccacagtcacttctgggttttattgccctccttttatagttgaggagatctatagtcagagaggtggttttgctcaaggtatcccagctctatgtggatggtctgattccaaagcccaaatgagctaattttactgtcctatagagagaagaaaatagggaagagccagagctgggggagggggtacactagagggaggggctactttgggttttatctctagcaaggaagggactgagatacctttggggccaatgcagggccaggccggcagaaggcagggtgggtggggctgagtcagaggagaagggataaatgccaggtcctaacccaagtacccacctgtcattcgttcgtcctcagtgcagggcaacaggtaagagctgctttcagcctggcaccctatctctggtctgccagctggtctctcagggctgtacacactgactctctggtctgagtagatctgactttttcctttgtttgtttcttagaatctgtctctttttcattttctttttatctcccatgtctctttctgtctttcctcattttcagcttttttctctctttttcccttcgttactttcttttgttagttttcaagatcattcatttcatttcatcattctctgacactcttgctttctcttatttttccctctgaattctaactatctttttctctaaatttctttctctccccctttttgtctctttcctcggctttgtatctctccgtctctgtgtttctgtctctctcttcctctctatcaagaacgatggcttaatatttcttcctgcaattccccattcctctctccctttgactccctctacctgctgggctgacagcagagctcagtgggtcagagcccatggggagcctaggggtgggggaagagctagggagggaaactaagaggatgtgggggtgatgggaatgatgaattgggtaaggagagatttggggaattgagagatgaataattagcagaaataagtgaagaaagtggaagaggaatgtagtgtcactatacagaaagtaaacagatttctattctcatcctaattcactgtgagaccctaggcaagtmattcactctctgaaaaaaaggcttggcctgtaatttccaccaccctttctagttttgattttgtgatcttctaaattttcctgtttctaagaatttctgattctctgattacagttatctaaagttctgtatgattctttcatggtgggaaaggggtactaggaagagaagtaaggcctgatgtttccaactcctgaagagaaattaccacttcccttccagacctaattgacttttgcaaagcaggccacaaaaggggtgggggggtggggkacaaggaatgctgcaatgagtgttttctggctgtctgctggggtagagttgcagytggcccttttcacctctgggagtacagattgggtgctgacacaagagaggattttaaagtcgtagggaaaaactttcagtaatgatctgttacttggtctcaaatttcaccatcatctctttggttaaaagtattgttttaagaagatgcctggcaagcattatcacacattaggtacataagttattgaatggtagagtaaatgaatattcaacagtacctgaaattccactgtagttacagatctgttcctttggtaaggcattggtgacaaatggcatatgacctggaaagaggcctatgttagtgcagcagaggagataaatgtctagagtcaggccctcagtcaagaaaaaaaggtagtaatatttgaatcacagatccataatggttaagttaggaatctctggaaacagattgcctaggttcaaatcctgcttctcctatgtactagctttctgatctagacaggttacttaatctttttgggattcagtttccctatcatcacagggttgacatgagaacacggcctggcacagagggctctgtaagtgtttgactatcagaactaggcggaatctatgaaattatctagtccaatgtcagtggagaaacggaagcccagagaggggaattacagagcccaagttcacacaataaattgtaacaggattgggacaagaatcaattctctagcttcccaaacccagcctggtatattcatgtgacttcccttggctgtacgttcattttttctacatgggaaatggagaaaataaaaataataaagtctatcaattaaatataatatttaacacttttttactgtttactctgggataggtactctgctaaatgctttatatggattatcttactgaatcttcacaacattcctgtgatgcagattgtccttgttattaccaacattttccagatataagatgtacagcagggaagtgacttttctaaggtcccaaagctagtgagtggtggagccaggattcaaacccaagtagtttggctctagagcctatactctttataccctaaattgactaaaatgcttccttgattcaattttactcactctagtctcttggtaggtaatgagatggaatagaaacagagcccatggtaactagactacaaggtcatgggtataatgatggccaggcagagtgaggcagagcaaatttcaggaaaggagtaacagaacaagagaaatgagaacaggagcttgaaagaacttgagaattcaacaaattccaagaagtggtctatattttcccaggaccctgagcatatcatggccaaaagccccctagtaatgatgtgtgttaatttctcctgtttttatatacaggaggtaggtcttctccaccatcccaaggcaggactggactttgcctccaatattgggggctttccttcccactacataccccaatgttgttggcattattgttgccagtattgatgttaggggagtttacaggagcctggagccttgtcatctgccttgcctgcacttctgggccatccatttcttaccaccaatagccagggccagctctagccagatgctcagacgtgattccaggaaggggctcctcttctctcccacgccctggtctcagcttggggagtggtcagaccccaatggcgataaactctggcaactttatctgtggtctgcaggctcagccccaagtgctttagctttcacaagcaggcaggggaagggaaacacatatctccagatatgaggtaggcactggatccaattccttacctaccttgtgaagtggccataattacctcacgtttgacagctgatgaaggccaagatccagagaggggaagtgatttgaacaagaacatccaacaatgaaattggagagctggaattttaataagaaaagctaacatttattgaagatttactatgtgccaaaaactatactaaaggcttaacttggattgtttcatttagtccctccaacaacccttctgtcttttccaatttcagggcccacatgccttggccccacataccaacccaggctgctgtgacagcccatgagagggggagaggttgctctgggatggaacaagaaaaagaggttgttttgtgaggtacggggagggtgcttgttctatgagatcaggaagggagggagatgaaggaggttgccatatgagggcagggccatgagctgacctgtccctcaaaacataaggctgagggtgctagtagattctactcagtaactttcttcacagtgtcagtgctttagtcttctcacattctcccatgtctctcccattgtactgtcccttatcttgtctcactttttgactctgtctttccaatttgccctttttctttacatctgtctctccttcttgctctctctagctgtctttctcttggtgtctctcagctctcacccctcttaaccctcatccccctgctttagtcacctctctgtctctatcctttgatcttgtcattttctctactctcttctctctgtccctcagtctctctctcatctccctcaattagggccatgattctcttccctaaacttacttagccttttgcaatttctggcagcatttttttatgtttgtgtctgactgactctctacccctgctggatcctctccactcctgttctcacttctatgaatctttgtataatcctctagactcattgatccctcctcatgtccctttcgtgccccttggtctatctgtctctgcctttatccctgtgtgcactatcaccaccccctttttcttttttcattttctctttctctcgactcaatctctgttttcatctctaccctgctccctttccctctacctttgatctctttttccccctcaatttctgttctyttaactctaccaccaccaccacatctttgttctctctctactttcctccttttatctttcctaaattttcttttcttctggcttttctcctagtcccttctccttcctcaatttcagactctgttcattcatcaatttaccccaaaattcaacaaatatttattgagtgcctgtgtgtcatttgctttctctttttctgatctctttgccccctttctcttctctgtcttggcctctgcctgtttcactaatccatagactatgtctttgtccctgttttccagccccactgggacttgctttcacctcttcctatatctgtgcttatccaagagacaggagcaaattcaaagacagcataatatcaggctggtggtacacattctgtaggacctagggcctacccttccttccggatcccttgatttccttaaactgatacatgtgacctcaagctccttctcccctctggctgatcctgcttaggaaacaccctgggccaagcctcaggagctctactcaatgacatatgtttgcattagcaggctgaatcttcacttggctaagaccaacattcttagaaagattcttggccttaagtattgatcaaagggttagtgggttggcagttctcatcctgccacacaaaaacacatttcagtgatcctcatcatcacagaggtagtcagtgccagaatgtgagtcagaatccaggctttctgacctccagttagaactgtttccttcacccctttgcccagtagtcagtttcctatttcttcctccctcatgttttattggtacatgttaacattgggaaagaagttctttccctggaagggcaataagagcatctcggaggcagcaagttttgggtgggaagctgaagacgaggatcaaaggcttggctttttgccaggccctcatgatggaacctcatctcttccatgtcttctgcaggactttaggttcaagatggtgactgcagccatgctgctacagtgctgcccagtgcttgcccggggccccacaagcctcctaggcaaggtggttaagactcaccagttcctgtttggtattggacgctgtcccatcctggctacccaaggaccaaactgttctcaaatccaccttaaggcaacaaaggctggaggaggtaagaagaggctgctagcaaaaggggagaatgttagggtcctggggtaaargttccaagttatactggccatctttgcctaataattaggacggttcatgtgaaaagtgtcaagatagcatgaactggccccaaaatatacccagaatctgtcttctgccaggttctctagaaagagtctcattctcggccaggcacagtggctcacgcctgtaatcccagcactttgggaggccgaggcgagtggatcacgaggtcaggagttcaagaccaccctggccaagatggtgaaatcccatatctactaaaaataaaaaaattagccaggagtggtggtgggcgcctgtaatcccagctgcttgggaggctgaggcagagaattgcttgaacccaggaggcggaggttgcagtgagccaagatcatgccactgcactccagcctgggcaacagagcgagaatctgtcaaagaaaagaaaagaaaagaaaagaaacagtctcactgtcatgtccctcacacactatactccagacatgctgaaactacttaaaattgcctaaatcaactattctgtcaagagtttgtgcctttgctcctgtcagattaccctctcctagaccctgtactggagaatctcatacttctcatttgacactaagcttggccatcatctcctctgcaaagcctgcttagacctccaaactgtctaattccaattctggctcatttcccctccctcttctggacttctgtagcccatgtacttcctctatcccagcactgttcacaatgtgtcttcagtgtatgccattcccaccagtttagtagctcccctagcacagggaccagactcatctatctctgtgtctctacaatagcctgagatagggctttaggggtacattagatctcagcaattattgttgagctgaacttatgactagaaatgcaccccaaattactctcttacctttgcatagattctccatcttgggcgaagggccactgtcccttcatgctgtcggaactccaggatgggaagagcaagattgtgcagaaggcagccccagaagtccaggaagatgtgaaggctttcaagacaggttggagtcaagttccaccttatgcaacctttactcctaatgcttgaacacactacgtcacagtcctgagctaggctaatacaaaagcagccagtacacatcccatgatgagaagtccagtctttccaggggagccatggtaggcaacagtttaggctgtatgctgaagcacaccatacctgacaaacacatatgtacgggctcctgaaacttttagtcattattctaagatgagccctctagaattttgactcctctttttcaggtggctaaactgatcccaacaggctggggtcccacatttcagcaagaccactctatgagaatatggatttgcatgaaagagaaagagctgggagtaggtacctcctttaaccagggtgcagatccccaggtcaacttaattagtgcagaccacccaagataatcacccttgagatatggccacactgttgacatctttcataggcccctttgggatatcattaaggacaaaaacttcaaaatkgaaatttaatgatgtttagaaaagaagagtaaggtacattatcctgcatctactttctaaatgcaggacccagggtggctgctccagttacctgagccaagggaaaatcctagtggagagaagtatgattcaccttatagaaggtttcctaacaatgtaatagtctccattcggggggataaatagaagctcaccttggagaagatttcttctcgctgtagaagctgcccttaccttataaacttgaattttcatgtgttgcattgagcttaaagaggacaacacatgctttctttttcccccattctcttcacggccaatgaatctcacattccgtctcagatctgcctagctccctggtctcagtcagcctaaggaagccattttccggtccccaggagcaggagcagatctctgggaaggtcacacacctgattcagaacaatatgcctggtgagtttgctgaggtggaaaaaaaggggaccggaatagggaaggcattctgaaagggcctctgtcacagtaggggaaacagtacagaagggccttggaaccaaaggaaatttgagtttaaaatttaatgctggcacttgctggatctaggtgttttggcaagtaagacactttccttcagtggcatttaatacctacctcaataggttaccatgagaagaaagtgaaattacatttatggaagtgtttctaatgaggcttcattaaatattaggcttatttccattatttcttctctatgcttccctcaaaaactttcacccttcatacagcaccttttccccattcttatatgtgtttatattcctttccataatgacatttacattattttctaatgtaaaaggaatatgattcatggtaaaatatttttcaacatatacaggaaagtataaggagggaaatttaagtcatgcagagttccaccattaagtttttgttatattttctcccagatatttttctatggctacacacacacacacacacacacacacacacacaccctctgctctcttcaccacacccatgcttttgttagaagtgtgatcttattttacctggagttcgttatgctgttttgttcacttaaaaatatgtcatgggtatagtatggattcaatatcattcagttaatcaagcatctataatttaagttgtttccaattttttgtattctctcagtttagattgtaggttggttttacatacatacaaatgtactcaaagaaaatgtatagtattacttttttcaatttttatttttacctaataatatcttgctatatattttactctgtgcccttttttcactcaacaatatactgtggaaatgcttccactttaacacatatgtatctaccttatttttcaatgcttcaaaatattttgtagtatagatataatagagattatttggctactcctctatttggttgcttccaattttttctattacaaacagtggtgcaacaaacatccttgaatgtatctccttgtgtacacaggcaagtgtttctccaggataaacactcagtggtggaaattcttgggatgtaaggatgtgtacatttttgatattaatacattttgtcaattagccctccaacatggctgtaccagttatcaaggagggtatccatagtctcatwcccttaccagcccttgatattatcaaactttaaatctttatcaattgataggtgaaattttgttttcccagttttatttttcctgattaagaatctttttctacatttattgaattgtctgttcatattctatgcccatttttctactgagttgaaatttttcatgttaatttttcagagattatataataaattctgagtatcaatcatttgtctgttaagtatgctgcaaatatttctctagatatgtcagtatgtgcatttaaaaaacttttgatatgtatttccaaacatctctgcagcaaggatgttaccagtttgcacctccagcagccatataaattgctgtctgcaacatgatttctgtctcacgtaaagagttctagagtttaacaagctctttggcaaacgttatttcaatttatcctagaaataaagttaccccattttgtagtggtaatggttaaagaagtgggctctgagttacttacttgatgaacacttacttgctgcatgaccctggtcaagttgtctaacacttaatgccccagttccctcatctgtaaaatggagatactaatagaactgtccatggagcattgttgtgaggaataaattaaatatttataaagttcctaggaaagaacttacatgtactaggcattcattaaatgttagctataatgatgtaattgaatattagctatctttattagtattattatgactactaatactatagcagtaataatactactattaccatgtgccatttattagtttgaatatattacatgttgttggttgtcagatgctcacaactctccaaggaaagtattattagcctcattctacaaataaagaaatttaaagtaagaaagaagattcatgacttgttcaaggccacacagctaggaagtggcaaagagatcgctagaaacaagatctgttgatactccttccagtgagactgaaagcagtgattctagtaaggaggctgccacaccaacccgggaagagagatgaggccataagaaagtctaaatgaatgtgtgaatgaactactgagtgaatgagtgaatgagtaagcaaaaggatggctgaatgaagtagtagagagttaatgtggtccataagtcaatgactgagcaaataaatgaatatgtggaaaaagagttggagaactcaaaatcagcaacatgggtaaaatacagactagccagggagagacttaaaaygaattcttttcatcctcatatctgctcctgcaggaaactatgtcttcagttatgaccagtttttcagggacaagatcatggagaagaaacagkatcacacctaccgtgtgttmaagactgtgaaccdctggrctgatgcatatccctttgcccaacatttctctgaggcatctgtggcctcaaaggwtgtgtccgtctggtgtagtaatgatyacctgggcatgagccgacaccctcaggtcttgcaagccacacagtgagtagtaggctttcagccatcagcagtggccagaggagatgaaaaaccacacatggaaaaaaaaaaaaggcagagctggcagtggaaacytgggttctatcaccacttcttttgtccaaggtcctccatcatatctattccttggatatgaaataagtcaacacaccatgtttcccaaactcttcggtgtccaatgctatggaggggaaggatgggagaccaagcaaggcccactctgcctgagtttttaatctagctgcagaattagtattgccagagatggagtgtgacttcctctaggtcttccaaactactcaagctcaacctagcttctccctctctccctgagtacctccagtcctagaaggaaggcacatgtctccctatcctccccatccttccctctactttgtctcataggacacagtttatataggatcactaactcaacattgactcccatsaaggaagagaaacctacccagttcctcgatgcctgacaagagtttctttttctccttttctcctgttttctcctggccagggagaccctgcagcgtcatggtgctggagctggtggcacccgcaacatctcaggcaccagtaagtttcatgtggagcttgagcaggagctggctgagctgcaccagaaggactcagccctgctcttctcctcctgctttgttgccaatgactctactctcttcaccttggccaagatcctgccaggtaagcctgaggcctgagctttgttcagggctggtatcctgcaatacagcatccagtttcactggttccatcactccttccctgtatttggagttccctcactcccattgttcttccttcttatccaccttgcatatcctcaacactggataattatatccctctgctttctctccttctgcacgtagagaggaccattaccggggaacattaccccacctcacagraaggaaacactataaattcatcacctcccaactcaactgagctcttaacacacatacatagttattttatgtctccacaggagctttttcaaacttcttctcctcttctaaaacctctgactaccttctcctccacacttagcaaataacctcacatcttacttcacaataaaaacagaagccccagacagagaatccttatttattgccaccaaacctacgaacttatctaattgtttatctagccttgcctcattctttccttttacaatggaaggcatatctctccttctgcctaaaaccaatcccttcacttgtacactggttcccatattcccagtctcctactctctagtctgtaatgtcctcacctcatacgccttgttgtccttccgccaaggcccaatccagaatgaatacaaccctccatcttcactatatcaattccgggctcatacagttgctcagacaggagtcactaaaaattcatactcttaacctctactgggttctccatggtctctgacaatcccatttccctggtcagttctcgaagtttatggggcagttttgccaaaccaccattatcctcagccttcccacaccccctcctccccatctccctcagcagacaacttcatgttctactacattcaaaatagaagataccagacagcaatgtccttgactcccagccacaaagcacctacaaactcataagcatcttcaaatgtcctctcctcactccttctcttctgtcatagtggaagaagtatcctttttcttgtgactaatccttccactgttgctctgtgccccattcccctctaccaccttaggaatcttgacctattggctctctcctcctctcctgtatcttcagcctctccctctctttaaacatgttttcaagtctcttgtatcttataaaaaaacattgcctcaacccctgatcactctctagctactgccctctttcctccctataacaggcaaactgcttgagagaagtcttcgctcttactatctacttcctcacctcctgctgattcttcagcacagcaaaaatattaccaccacttctcagaaactttttttgagtccacccataagccccaactaaactcaacatctttaagttgtttttagtccatcccctcctcaaccattaaacttctttccatctctactgccagcatcctagcctgatccaacatcattttttaaagaaaattttacctttgccctccgataatctattctttacaacagtcagaattttttttaatgcaaaactatctttgtcaccccaccctcagccctggtcaaaaccctttagtggacccccattcccccaggaccaaatccaaatttcttatcayagcttctaaagttctcaataatctggcttctatgtatctcttcggtctcacctttttgcatccctcctctcactatttcattcagtaatacattcattcatatactcattcacttacttataaatctgtcatcagtttatttatccattcatttaataaatgtttacttagcatctactgtgtgcttactcttatactggacaccagagacagagagataataagatgtttttgctcccatgcaactcccagtctgcttgtctttcaagccattttctccagaaagccatwactcattttctcaggtggaagttatcccttaatcttataataaggccacagttccttgatggcagtgcagttggtggcaggggttggggaggtccaggaatcaactccctctaccaatttcacatgcccacctgccccaccaggattgcccagtaaaaagccctgcattcttcaaatctttctggaccttagctttctcacttgtwtagtaaagggatgaatcccatgatcactaacagccctgccagctctgacatgccataagcttatgattccaacagtaaaagcctgataaatatccatccctgtaaccacaagcagatgctacctggaatggatggaatttcatctagactaggaacaatctagcatcagtccgagtcaacaaacattccctggggtaatccctttttcaagtcttgatcttatatattggggagaaggaaaataggtcccgtcctcaaaaaactctgaagcttcttgggaaattaaatgttcttccaccccaaggcagtcagaggctasaccagggttacaaatgactggagggaaggatgtaggggtcagaatttgggaacagtgaagtccttccaagggagaaagaagtgtcacaaaagttcccagagaaggaagaagcagagcaaggtcttcaaagggaagaaagggttggcccttttctttgccaggtcaaacctgaaggttgaagtgggagtactgggacagaagcttaaggattatayatctgcttcctcagggtgcgagatttactcagacgcaggcaaccatgcttccatgatccaargtatccgtaacagtggagcagccmagtttgtcttcaggcacaatgaccctgaccacctaaagaaacttctagagaagtctaaccctaagatacccaaaattgtggcctttgagactgtccactccatggatggtatgtatatgagtgagtgtatgtttactagtgttggtctcacaaaaaccatgatgatcatgatgatgatgatgacgataacattataacagctaatatttatagtgtttattatgtgccaagcaaaattattagtattttacatgtattaattcatttaattttctgaacaattctatgtgataggtgttattattattttgattttttacatgaggaaactgagacataagagtaatttgtccaaggtcacacagctagtaaatgccaaagaatggaggcagctattacattcatcttataggtaaagaaactaaagttcagagttggcatccaattcatcttgagtggctcagcaagttggtgctaaagtgagtatctgcaccctaacacatataactccaattcctcgagtaacacttctcttgttagaaatgatatgtaaatcaataatcccagtgtttggtttttatgaaggaaatttcaaaaaccattgcctaggatttttttcaaggtccagtatgaagcattggggtcaaaacaggttttcaagtcagagagacctgggttcaaatcccacctttgacagttactggctatgaccatgggtaactctttaactgtctaagcctcaattttcccaaaggtaaaatatctggttgtaagaattagagatgatagaaaccattctagttattatgctttagtagaattaaatgatcttcacactcctacctcctttctttgctcaattgaaacaatgtccaaagctttctattgctggccctgttgtgtagaaatcatgtgttttaggcatcctcttatggatttatttaagggaagaggtcctcaactcatttcagtttgtcccttttccaactgaaacaaaagagtccatagtattccctgatttaggtatcttaagtggcatgtaatgactatacacacaggctctaaaaccagactatccatgttcaaatcctagcatgaccatttactagcttgggcaagcttcttaattgctctgtgtctcagttctcagttgcttatttgaaaaatgtaagtgataataattaaataggtatgcaaattaaatgagttaatatatgtaagaaacttactattatgcccactcccacatttctaacactagcaataaagtaaaactatcctatcccttttgtatatttctaccactgagactattcaaattcattatttctctagtggaaactatgttggtaccattctacctcgttacatttgcaaataaatagttatttacctatttttggggtgcaaactctgcccaaactgttgatccttaggctgaatctctcccattgaaatgatgctaggctgaacacagcagaaacaggaaaatagacattgtcagaatgaagtaaaaacagaaagacaaagagtcaagccttgatcccaggctggggaacacacacacatgcgcacacacacgtacacacacacacacacacacacacacacacacacacacacacacacacacagagagacagagagagagagagagaaggcagggatgagatacaggcaatcgatccatacacagaggtttgtaatagttctaaatgaaggcgcacatcctccttcctctctacaacacccttttccaacccaaagtaggcatgtatgggaaattccacattggagatggagctggggaagggttatgatgtcctacctctatcccttggctttgctcaggtgccatctgtcccctcgaggagttgtgtgatgtgtcccaccagtatggggccctgaccttcgtggatgaggtccatgctgtaggactgtatgggtcccggggcgctgggattggggagcgtgatggaattatgcataagattgacatcatctctggaastcttggtaagtgaatgctttgggccttcttatataccctccagagaggaggcccttacaaaattcttttctgcctcctccccaaagctataggggttgtttggacagaattcacagccccaggctgctgccatcctggactccctctctccactcgcatcccactgcagagttgatgagaaagtctggtagagttttttgaaaagaccttgaactaggccaaatagttagattcaacttgagtatgtgaagagctgtgtttctaaacccctcccccaccctagccccaagcttcatcttagctccactcctgaccctatccagctaaaggtccccacccagctmctgcctatctagtcattgcatatggcaagacttgaaagtcctatctcaaagcagcagaattatcagctacgactgccttgtcatggacagatgagcagaggcctgggaagacagcctggagccccaacttctggtgcacccccttgtgttatctggcacatgatcctgttgctctgggactgattatgggatctgtgtatatcttattcctttctgtctccaggcaaggcctttggctgtgtgggcggctacattgccagcacccgtgacttggtggacatggtgygctcctatgctgcagrcttcatctttaccacttctctgccccccrtggtgctctctggagctctagaatctgtgcggctgctcaagggagaggagggccaagccctgaggcragcccaccagyrcaatgtcaagcacatgcgccagctactcatggacaggggccttcctgtcatcccctgccccagccacatcawccccatccgggtgagagccccaccatgcccattgccctctccacctatttattctgggagcctcacgctcccaacaaacctacatctgttgctgtcttcaattatttgctttcctgctaaccattccctttattgccagctttgtttccctttttgaaaaattatcagccattctggattaaccagtcttttccttgcatcagccattacctcatgcttattagattatcctaaccctaacaatagcgagtgctcacagcctataattcagagtttttcaaactggatcaagacaattaatgggtcacaaaatcagcttagtgggttatcattagcattaaaaaaagaaaagaaacagaaaatgttggagtacatcacatactaagggtatcatcaatttgtgaaaaatttgtatgcattttgggtatttgcatatacacatgtatgtgtatgtgtgcgtttatggtcacggtgtaaaacgtacttcttattgagaaatgagggcagaaaaataaaatcaaaagccataggattagctgctactttggatcctcaatatgagcatttactgcctttaaaaatgaactgctacttctttcttaaataacacgtatttgtgtgagtcagtaagccagggcagggaaaggacacttatttgtgacaattttgtggatgagaaatagtcactgctctttagactaacctagtatttcctttaaacactcattttatgaattaatttagtgacagcaccccagaattggcttggcgggggttccagaattggcttggtggggggtatcttctcacccagaaccatcccaaactaagatattagctaagtaaaatcagtgtgcttgctctgcaaacagcttccaaacagggctcctggtaccacctctgctccatccttttcaaaccaaattgctagctctgagctcctccttgatagaaattctggagctgccactaagcccctaatggaaaaaaaaaatctatcccaaaattcagtgatgttccctcatctagttccctccatctgcttaatggagctagtgatggtggagccagagtggcaggtactgattagcckttctcctgagtccaggtgggcaatgcagcactcaacagcaagctctgtgatctcctgctctccaagcatggcatctatgtgcaggccatcaactacccaactgtcccccggggtgaagagctcctgcgcttggcaccctccccccaccacagccctcagatgatggaagattttgtgggtaagttctcaacatgggtgcctacaggacctccctcccctcagccccaggatctgaaagagaagctgagaggacagagaccactgagtttacaaaatatttctggaacatctaatgtgtgccagcacctatactagggtcacaaataaatgaraagcagcccctacacttgtagggctccagtttggttggggataccatagtgaacacaaacaatgacactaagggatgatcaaagctccacaaggcagtgcatgatagagttgtcggagcagagaggaggggcctgactcagcctgagggatgcaagacccacttcctagtagaggtgacacctgagctgagtcttgcaaagtgagtggtattaaaagaaagagggcatggaagaagtattcctaccagagggaagagcatgaagataggtgaggagaatgagaagcagccagggatatatcaagaacaataagcaggtggtattggaatgtagggtcataggaatggagtggggcaggggagtatcaatctatgagtctacaaagacaacatgagatagagactggattgagaggcttgtagagctgagtagtttgagatttaccctgaaaatgccagtttagtcaattcacctaatgtttgttggatttctgttgggtagttttgtttttgtttgtttgtttttgtttttgtttttttgagacagagtctggctctgtagcccaggctggagtgcagtggcacgatcttggctcactgctacctctgcctcccgggtcctggctcaagcaattctcctgcctcagcctcccaagtagctgggattacaggcacgtgccaccatgcctagctaatttctgtatttttagtagagatggggtttcaccatgttggccaggctagtctcgaactcctgacctcgtaatccacctgcctaggcctcccaaagtgctgggattacaggcgtgagccaccatgcccggcctgggtagtttttaatgcagggcctgacattgaataggtgctcattccaggcctgttggatgaaagacatgtaggcagttgatggtctagcagaggagccagatatagatggtactggtccagtatgatgagctccagtattctgggagctagagggagtggacacattatggagagagagggtgggaaggatgaaattggagaggctttgtgagtaaggaagtttttatgatgcatgttgaagtacaygtgaatatgttgtaagaatattccagaataagggaattccacgagcaatgacctagagataggaaagcagtgggtatgtattgacaacataattctgtttgtctgaagcatgggcagtatgagaattcaaggaagacaagctaggtaggcgccattcattcattcaaaaacattaaataatgctggctaacattaagtacttaccatgtgccaagcactgttctaaacactttacacgtattaactcatctaatccccacaacaacctcaagagttagagatcctcttatcatttccattttgtacatgtggaaattgaggcacaaaaatatatagtcgctgatccaaggtcacacagcttctaagttgcaactgggaggtctgtctctacctccatggtcataactgctaggtctaccacctctctgagctgatgacccagactcctgggccttttgttcagtattctcttttgctctgggcttcaattgtwgagctctcagtattcttggttctctgaatgtccacctaggctaggcttttgtaagaatatatgaggcatccacgatggctccaccagtccctaagttccatagccaatccatcctgaaatcctgcaaaagttatctataatctctctcaaacctatttgcttttctcccctgccacttctttaatccatgtcaacatgatttttttcctaatttctctgcttctctcttgctcctctcaaatcctttctcgatgatgaccactagagggatttttctaaaattctgactatattgctcccttgcttaaaccccttcatgtttccctctagactctaaagcagtgacctccaaggggtatgcaaaatgattacwgggtgaaggaacagaatatgtattagaattttatgtttttttatcttaaaaataggaaatcaagcatcactgatactgatctttaatatacagactgacagttatacatgtatataatatataaacaaatatagagattggaggtacatgctaaaacatttgtactgatagggatgtatagtccaaaatttggaaacattgacatataggacagagttgaagctcttcagcatagcattcaatgccttccacatggtgatctctatgccctcacctcctccccacatgcattttgttttttcagctacactgaaggacttgtcgttccctcatttttttctgctctcttacctctgggactttgctcatgctgctctcttttgattggaatgccctccctcacactttcctctggcttactttccttcatcttgtagacttaacttaggcattctttcaacaaatatttattgagtaccaactgtgtactagatactgttctaggcactggggatgcagtagcaaacaaatcagacacaaaattcctaccctctggagcttacattctagtggaaggggtagtaaaaaaaattaccaaaaataagcaaattaagtagcacattagttctaagtgctatgggaaaaaataaagcaggataaggagaatgggataaggggccaggggcgagttcagagaagggttgtagtattagagtggcaagggtagaagacgctgaggtgaaacttgagcaaaaatttgaaggaggtgaagttagtgaggcagatatctaagggaatggcatcgcaggcagagggaacatcctaaggcagggaagacacaggagtattccttttatatttgaggaacagtaagaagatgggtgtgggtggaatggtataagcaagtgggagacagaaaaattgagtacatagaggcaatgtgggaccagattgtatagggtatggtaggccattagaaggagtttggcttttactctgagagcccttgaaaggatttgaacacaggactgatatttctgactcgggttttaacaaaattsctccaacttctatgtagagaatacactaaaagggagcaagggtggaagcagggagacccaagagtgggctacagtaatatcccaggtgagagatgatggtggctcagacttgatcataatgaaggcaataagaagtggtcagattttgaaggtagagccaagggtctttgctgatagatgggatatagggtaagagagaaagagaaaaataaaggatagctctgaaatttttggactgagcaactggaattgccatccactgagatgggaaaagctaaaagtagaatagcttggtggagggtagggacatgagtagctcagttgtactcctaagttagaaatgcatattagacatctaggtggagatggagaaaagccattggatatacaagattggaaaccagtagagtggcgtgagctggagattaaaatttctgaaccatcagcatatagatggtctttaaagtcatgtgactagacaagatcaacaagggcatgaacacagaaaaggccaagaacagagccctggaacgtacctggggtacttcctccagctaggtcaggttcccttctctgggttttcacacccccaggtggaccccctaccccaggtttcctggtcatagcaccaatgacacagtatagttactgtcattatcattgtcctcatagggcttagagttcccaagcagacagtcattcttgggccacagcacatcctatacttagggagtggtccaggccaggacagtatggcttcaaattgtgtcaaaggagagcttccaaatcttttataatatatatcccagcatccagatacaaatggtaatattcacggcacacacagaagcaaacagtaggctacttctggccctgaggtatcttgaagggttgagggggatcaatatcttggctcatctgtactgtgacagatttggaagatctagtctaacccattttttccctcccctccccctaccaccttcagagaagctgctgctggcttggactgcrgtggggctgcccctccaggaygtgtctgtggctgcctgcaatttctgtcgccrtcctgtacactttgagctcatgrgtgagtgggaacgttcctacttcgggaacatggggccccagtatgtcaccacctatgcctgagaagccagctgcctaggattcacaccccacctgcgcttcacttgggtccaggcctmctcctgtcttctgctttgttgtgtgcctctagctgaattgagcctaaaaataaagcmcaaaccmcagcatgtgaagccttttattggacagggaacagacaagtgcattctgactccctcagacaagtggcagatctatgaggtaaccataggtcacttgttggtcaccattccattttaccaacagggaaacagaatgagaaagaggaaggaaatgcccaaaaactacacagtgagttgcaaagagctaggatacttggcagatttatttgaratggctcttctccaatggtttcaataaaaatccagggattgacgcttcactggtaatccgggccctggaaatctgggcccagggtagcccctgaagccaggaaatgagtcagccctaaccaaattccctagaaaggagtggttccccaaaaccaaagaggtattttccataaggggatatggatgtcttcctcaatccattatcctctctccctcccacggcatcccacagaacaggatttaccagtcccattctttttcttttctttttttttttttggagactgaatttcactcttgttgcccaggctggagtgcaatgcatgatctcagcccactgcaacctccgcctcccaggtacaagctattctcctgtctcagcctcctaagtagcttggattacaggcacgcgccaccacgcccagttaatttttttgtatttagtagagacggggtctcaccatgttaggctggttgcgaactcctgacctcaggtgatccacccatctcagcctcccaaagtgctgggattacaggcgtgcaccactgtgcctggtctaccagtcccattttcaaaggtgagaagaggcttggctagagcaagcactgtgttcaaagcaatgctcccactttccaggtcacagtatacaggaaacatttccatggcacacttaggggtactaatgatactacttgctaaggaggcaatcgtccctgaaacttgtgtggtcccaggccctgcctggcaactctgagggctgaggaccgtttctttcaaccctgtaacccactgtggcagctgtgggacgcactagctggaaagctctggtttaaggctacacagcccaccttccttgctgatttcaccttagccgtacaggaaattcctacaactgagcagagaaccctttatggtgagcactgctgctcacgcctcactattccctcctcccccctccctcctcccctttctctgggaattacatcattgggctacagccagccggcaaaccaagtattgagatagcttctctgactcaactttatggagtacctccacaatgtccaaagtgcaaccctgaaacaaatacacagactttatttatgcacaaatacactttccagcaaagacagaagtgatttaaaatcacacaacttcctggggcagctagtgtccgtgtacttcggacaggaaggtggaaagtggtgtaaggggctgggtcacaggattaaggcacaagaagctcaccaacaaggagctaggtaggaaggaaagcgaggaagagagggcttaaaagaggaagagaagggtaggagactttgagggagaagcaggaggcagctcagggaaggggagctggcctcagatcatgtgcaggggtgaccatgccagatgtccccaggcctccattggttcagctgggcctgctccagaggaagaagttgcaccgggaggaggggtcagtgggaggaccccggggcctggcacacatgtagaagcggcggcccaagttgggtcctggcttcttcacagtacgcatcacacatggctccctgtggcccccacagaggggtgtgcgcaagggccccgccagcacagacttccagaatgaggtccgtaactccttctcatctttggcttctgaagtcttggcctgccccttcaccactttggccactgccttctcttctggrgtcttcggggtcatgagggcgctcatcagtggtaggctaggcagctctatgtcaggagaggcttggggacagctaggggarggctgaaagtagctcttcaggtttttctggcctctgctagagccaacctgactgggctgaggcctggttgagcgcacttgggctttgttttggcatgtctgtacccgggtttgattgttgtgctgcagcgtcgactgctccaacacaggactttgttcgagaggaactaggaagcgaaggatcttgagctgggtgcctgcraactcagggaggaagcgggtgcacagaggtgggcactgttttgcaggcacagaggacacactcaagacygcacccacagggcagtggtcagagcccatcacctcaggcagcaggaaagaggcctgaaaggtgtctatgaccagggtcctgtcccccagcacatagtcaagccgggagccatagttgagatggcgggcgccagtgactgctgaccagcaggtgaaggccccctcctgctttggttggaagcagcggtagctatcgatgaagggccctacatgagaggcagactggcaccccaagttactgagcaagctgtccatccacttgcgccctgggtcctcttcaaagcattcctaggtgaggaggaaagggggttggaagagagagagacagaactagatacctagaactggaagggacttagactaactgctgcattttgcaaataagaaaatttggttgtcccaagaggactactgctcaaggtcacacagtccggaattggcagagctgggattctgattttcatccttactgatttaaaagaccatgcttgtttttccctctgcacgagcttgcatttgtcttgcattggtccgtcaatggcaaatctgaaagtttgcttactcaaagcaattcctggaactgcttttcaaaaggatggaaaacaggaagttaaaagtgtttgcctctaggaagcagggctggggttaagagttaggaagactgtcagcttcttcctttaaaccctctggcactatttggtttatctagtgtgtcaaagccctcaatgaccattcctacctcctgagctgaggacctgcaaggatccaggtctgaatacttccttaggctctgatccccaatccatcatccatcagtccatccattcaatccacctacccacccactcattcaatgcaagaaatgttcatggaatacctattatgtgccatgcatgatgccagggacaaagtaggaacctgatctactcctggggaccaaggaggcttcctttcgagaagtgatctggagctgaggtgtgggggctgagtaagagtaacctaggtggagggtgctcctaactttaagaacagtctctgtgctgggcctgtggagggagtgtgctgcgtacccaaaagacttgaggaaagaccagactggagaccagaataccagcaggaaatggctgccatagtcacacaagcaagatgatggtcacttggactagggtgggtgccagaggagacagaaacatgaaattatgagatgatttgtagctagaatcaacagtacttgctgactaactgaatgtgggaagtggagtaagaaagaaagacaatactagcacaattcccaggctttaagttgaagcaatcaaggggatgatggtgccatttacagaaatgacaagactaaaagagcaagcctggtagaaagtgggtatgttctgctattttggaaagactgtgtaagtcatctgagctggcactattagttctcttttcctggaggagaaaatgaaagaggtatacataagagatctaggatacctctgaactaagtagaaaaggcacaaagatgtatgatgctatcacaggaatctgaaagaacacactgaatgaatgcataagaggaatgaggcagggagggactgaaggctcacactttgtagcattatctccgctccccaccacaccaccaccaccattctctcattctctcacttctgctcattttcccagctgggagccatatctacatttatgtagctcttctgtgaattaatcaaggaatattcccacggtcccttctctaagccaagcccagtgctgagtaggactgtaccagcataaatcactgatcccccatcgtgagacataaggcaagaaaagatgagagctggcttgtggattctagggcagtggttctcaagcctggctgcacaataaagtcacactgggggcttttagaacgtgccactaccctggccccacactcgagagttctgagttcattgatctggagtagtgctaagatattgatatttttgttctaatatgcagttaggggctgaaaaccatgggcctaggggaacttagagataagaggttcatataacaaaaagacagggagggggtcatgtccaccaattcagggcacagtgagaaaagccagaatgagaataacttttacaacgggccgacaggagacaacctgtctagagaggacaaaatgtgtagggacactgaaggtggaaataagagacaggtcacagaccaaggagagccttgaatgctaggtctccatgttttctctgcatcacagaggtaacagggaggtactgaaagttcataaacaagaaatacagtgtattaaggaaatgaccaaggcaatgtggaattcacagtccttgaaatctgacccccaacaactctccagccccaccttctgccactcacctcccttcctgtgtcactaagaagaaagggacttgtggttccccatgcacacaatgcaaattctcaccttgaaacctttgcccatgctagaatgctttctacttcaaagctctgttctactcatctgttaagattcagccattttcagctgcctgtcctgatgtccgagctcacctaggaatcccatctctgagctcctgtagctttctgggatgccatctgtgcctctgccctgagaataccatcctataattggctagccatgtgtctgtagcccaccaccatgctggagagctcctaggagccaagggctggatctgactcctgagtcctcagtatgtggctcagggccaggccatgggcagagtcagtattgtctattgaatgaatgaccaatcctcagtactataagaatagtattgcaagccaagctccgctttcccataaaggaagctgtccctgggccaaaaactcagggttggttggctggacaaacagaatcagtcaggagtggggccaggcacctagagggagccttaccaggttgactgcatcccagtggtcaatggggcggtgggctgtattcaggtcacccagaatgatcacatggctgaaaaacacaatgtgggattgttagaaaggggtgcagcagtcctggcccatatactttttcctgggcccaagagctcagacaggccctctcccatattgaggcttcctagccaacagcaactcataacagcctacctctccaatcttaccacaaacttgctgcctttcatatctgaccaacccaattctgatctccaaaggtgacagtgttccatgtttgacatgactgcctcactaatcaggagccaatgggcatttttcttgtccttcaaagctgagctcagataccacctccccttgattgctctaacccaccctcactttcctgtcctccgctggaacaagactttcctttgctcccacgcactttaccattctcatctcattttacccttaaaactattgtgtagggtagagattcatatattcatttgacaaaagagaaaacagaggcaagactagccctagggctcacaatgagtaagagcaggagcctgaataggtgctcagagtacaaaacccatgtttgttttgagcagagcctattcaggtgggcatattggtgtttgcaactatgctgtgaaagaactcagagacaaagggtccatatccctttcaatggagcttgacacagggctgggcacccaggaccaactcaaggaagccttactgcccaggcttgcagtacctgcctgccgccaggagggcttctgctcggatttgcagcaaacgatagaagcgcatcttaaagactagccgctcaggcctcccagggtccgcatgggggcagtacacgttgattagggtcaaggtcttctccttaccttcccatgtgctggagaaaagagaaacccccaaaaggggtcagtttcaaacctccccttctgtcccttccccataccacatggcttccattttgtgactgtctgggatggaaaagaaaggggttaaagagacacaaatgatctggcatgcacaggacttggggactgactactgataaggcagggagagggatatctaaggattaccaccaggtaatggtgctgctattcacacagaacacccagaaagacagcaacctggggcactgagttcagcactaagttgcttttgagatgtctatggtaataagagctggatcactaggccagccccacattgtagagatggaaactcaagcttcagaggggggaaaaatttgccaggg

SEQ ID NO: 94251 - DNA, 32642 bp, Homo sapiens
  misc_feature (1)...(32642): n = A,T,C or G
tatcatatgtatatgcttttaggatttttttattgttttgataaattgatccctttttcattgtgaagtctttatttactcatgatataatctttgttctaaaaattttttagaagaaggaatgtatcattattgaagtagcatcaaaattatgccacttcagctttttaaattaatattttcttggtataaatcttttttaataactttattgagatataatttacatgccatataattcacctacttaaagtatacaattatatggctttctgttatttacagagttgtgtaaccatcatgaccaccaattttagaatattttcatcacctccctagaaaaccctgtacccattagcaatcactccccttcactgctccccgttccagccctaggcaaccactaatctactttgtgtctttatagatttgcctattctggacatttcatataaatggaatcatacaatatatgttcttttgtgactggtttcttttacttttcaaggttcacccatgttgtagcatggattagtccttcaatcccttttattgattaataatattccattgtacagatatgccacattttatttttatcccttcatcagttgatggatacttgtgtgaactcagtggatttgccttaaagtgcttgaacaactatgacaagcagagtgttgtacgatggagatagtggaaatgggggtaggtgggttacagatgggaaggaaccccatctatggttttagaaattctgggttttgttccattgtggaagtcagtgtggcgattcctcagggagctagaactagaaataccatttgacccagccatcccattactgggtatatacccaaatgagtataaatcatgctgctataaagacacatgcacacgtatgtttattgcggcactattcacaatagcaaagacttggaaccaacccaaatgtccaacaatgatagactggattaagaaaatgtggcacatatacaccatggaatactatgcagccataaaaaatgatgagttcatatcctttgtagggacatggatgaaattggaaaccatcattctcagtaaactatcacaagaacaaaaaaccaaacaccgcatattctcactcataggtgggaattgaacaatgagatcacatggacacaggaaggggaatatcacactctggggactgtggtggggtcgggggaggggggagggatagcatcgggagatatacctaatgctagatgacacattagtgggtgcagcgcaccagcatggcacatgtatacatatgtaactaacctgcacaatgtgcacatgtaccctaaaacttagagtataataaaaaaaaaaaaaaaaaaagaaattctgggttttgttcctttcttcttctttttttttttttttttttgagaaatgaacaggccaaagagaggagtaattcatggatctgactttattcatggttcattctccccactttagtaccatattccattccccactgcttagaccacagaggagaaagtctctgaaataccagcctaaattcagtgaaacctgtttaaataagtaatttcattcaactgaagaattttcagtagataaaatagataaaatacggcctccaggactcttgcaccagtctgacttttagctgctgccaaaaacaaaagaatgtttcacttggaagtgttccttgttcttcttttaaggtaaatctttactttgcagattgtagagttttcaatattatcttgatgttaactggggaaaccactgatcctatgttgtagacatgggccaggacagtactctctggtagaccttggctccgggacattcgggtttgatttccctagtacctttggtgctgacagctcctgcttcctacacagctggtgccagcgctgtgaagagtgagaacttaacttgcagggacaggagaatgagactctctgggtgtgctatgggcagagttagactcccatagagcacaacagcccatgtgatcaagctctgcccagcagcccatgtgatcaaccacaggctgcaatgtttcatggtggagaaagaagggatgagggagcctgtgcattcctttaactgcagtggccaagaagggattcagaaagaggctttaaacctgagtttcacaatttatccttgctgtcactggctagttcgaactctccttgctccttatctagactatagcaatcacttcccactcagtgcctcttcttccagaatccttattttcctctattccttcttctcatggatgtgaaatgatggaagttcctagtctaccctcccttaaattatgaagtaatgtttgcttacagtgttgaaacagaaaggaaagactaaagcatcccttcagctgcccccaccaccatgatttctttcctcatttgcctctgagggccagaaggaactgagggaagcagagagtgtaagataacagggaatacattgaggaataaataggaactgtatgggagcctctcctaaaggcattcccatttaagtgaaaaaacaaccaccaccaataaacaaatcttcctgcagattaaatttgttcctgtgctgccaatttgccccacctagatctttccagcatttctaatacgtatacatctataccaatattataaatgtaactataaatgtttagatacatggtacatatatgttagacaaccaggattacaatatacatactattttgaactttgctttttcatgtaacattgggaagctttacatgttagacaacctcataactagcaccctgtcgatggacatttaggttgtttccagtttgaattttttttttcaaataatacagcattgtttgttcttagacatgtgtcagggagtatacataaagtataaatgtgaaacagtggaatagctgggtcaagtttgatagctattgccaaaatgccttcccaaaaagttgtatctatttaattctagcaacagtgttcctctgtttaattttgaacttttttttctctgtatatgttttattagttattcacatcagaatagctgccctcttttcaccggcccagagtgaactacccacagaaagtttctctactctgtttattgaagaaccagaggaacataaatatgttttgcctacataaagttaatggcctgtagtaaagaatgtagacttttaagcagccttccatgtcatttggcttaggaaacactgagttagtgtgctagacacctggcatgggtttggaggaaaaaggtgggcttttttgggcagtgcccgccaagttgggccacagctccaccgcctaccccttccctcttgctcaatgtacacatcaccaagtctgtgctccactgtttctcctctactagagagggacaggagcctgggggatgggaatgtgtcttcccctcctggagtctgaacatcctcgttggacttctagatgaggccagaacttcctttgagtactgggccacatcttcataagcttcagagacctcttccccctgttccccattctcatatcatcttggtgaaagccttgcccttctgcccagtggcccccttcccccaaccaccagaggcaaaggagtgcttgaaactgtggaaactttaaacattgtggattctaagaagtaaagcctttagtagtaaaagatttaccaacaaataaagtgtttctgaaaaaggttgcgttgctctagttctagcaaygtgctcactctgcagctgtgggatctctgggtgccatcttgttttcctgccactctccctattccctggcagaccctgtccccttggaatgcccacagaattttgatcatagctaaattacatcatttatcacattacttgttgtcagcttatgcgtttatctctaccactggattgcaagctacttgaagttcttaataagaacagcggcagcaataatacagtgcttcttgtgtgccaggcaccccaccaagtgctttacacatattaactcatttagacctcacacgtccctcacaatatcttggtatcttcatctctcacaactcattaaacattctatggttgtctttcaatttagatctctcttcttcaaaaggagtttttaagaaaaatctattactggcttgtaatatatcaatctctaagcaaaaatactcgtaacattcatataataagaacagattacatgggataaaagtaggatcattttctcatttagcctgacatcaagagtatttatttggctttctataccattagtttaaattagaacactctatttccatccactagagtagaatagctatgtgttttccctttaaaagataaattaactctgtaagcattaatactttaaaaaatgactagtggtttttcaaatattttagttctaccaaactgatgaatagataaacatgagcagatagatctggatttaaatcttgattccacaatttaccagctctgtgaccatgggcaagctccttaatctttcaaagcctgttttctcattagtaaaattaggataataatagttctttatagggtaatcatcagaagttaaaaatgtacatatgagaaattcagcacagagtctggcacaaagcgattaacaaatatttgctgttattcattcttatcatcattattataaaatgttgggttgagctgggcatgacggtgcatgcctgtaataccagctatttgagaggctgaagcaggaggatttcttgagctcaggagtttgaggctgcagcaagctatgatcgcaccactgcactccagcctgggagacagggtgagatctcttgtctataaaaagaaaattaaaatgttgggttggcaaaagggacatagaaatgagtaagatgctgtccttgtcctcaagaagctcagctctgtggtaggagagacaagacaggtctgcaaacatcatcacaaaacaatgtgataaggcaacagagggacagagaaagcacagaggagggagggatcatttccataggaaagtttcatgggaggcttgcaagaggatgtgaaaattacattgatttttaaagaacgaggaggaattttttaggtagcccaagtgggacaggacatagctggtcctggagaacatgtgtaaaggcacggagaaaggaaactgcatggtgttttgggaggaactataattagtaatgtttggtcagatcatgaggttttggtgggggtgggtaagatggaggtggtaagatagaagattctagaggaagtcaaggcaaggaccagattttgaagtgttttgcatgcggagctgaagagcttgaatttagcaccagcaatagggtgtcagtaaagagttttataagagagatgtgatcagatttgcattttagaaaaatcactttggcaggtttgtgaatgatggaccagaaatgtgtgatggtggagacttggaagccaattaggaggcagtagtccaggtgagaaataatgccccgaacaagggcaaatggcattaggaatggaggggagcaagctgaactcaagagacccttgggaggtaagatgaaaaggatggggaggagggaacttgttgggatctgtatccaagggtacccgaccccttggtctcattccactgttccacaggggttggtgacagtgtgtgggagacaggggtggacagaagtgcgttaaccaagatacagactagagaaggaagcgtcagttcttaggacaggggtcagtttgtagtgtgggaaagaggaggtgagaaagggtagtgaatttcacctggcccttgttgagtatgtgatgcctgtgttcgccatgtgaacagcagaaagcagcaaatataaggatcgagagcacggggtagagagagggctggcgatggacaccatctttagggtaattgcgaaattaggggaagggctgaaatacggaaggctcgccgaagatctctaggtagttaataactatcaaaatgtcacttctttggccttcacttttattatgtaaaagtactcagatcaggccgaatacaattttattytctttatccaatgccggaggctattgtcgaagccacggcctgccatttcataccctttgcaataggtggcgctgacgcctggcagggagaaggcggcagcacatgctgggctcgggggcgatgggcttgtgcgcggacctggcgacgctctagccccgagccgcgtattcgtggccgggtcctccctgggaacagggtgaaggccgagaacctctggcctcaggaagcgcatgcgcaaccggttctccgaaacatggagtcctgtaggcaaggtcttacctgaatcaggtaagaggcgggcggggaaggagtggagcctccccgtgcaccctcgcagcccgctccaggagtgggactagccctccttgggggtgtggctcgtgtgcgtgggccacaccagtcctaggggcaggtaagtgcgcgtggcccaggaggcgtgaggctgtgctggcgaggggagggctcccggggcgcgtgggtgcccatacgaggtgcgccgccgccggtccagaagagggccacgtgggcgagagcctcggtcgtcgcctcccagcacctcggggtcgtagagaacacaaaagtcacacaaccctcgccgaggcttgacccccgcgacagagtttagtcattccgttagctggctccacccgccctcctgggcgtggggactcgatttcttgggaggctgcgccttcctacttgtgggacagccaggcttggaggttggaaaggtcgcaggcacacgggtgtgaccgagtggtagagggcgtggctgttccgggtcggagctgcaggtgtcggtccaggtccaggcgctggggtcaccagggcagagagcggcagtggtggcgcggctgggggcctggttcagggagggggacagctgaagaaggtgtgaggtgaggagagcaatcgaggaaaacggaagcacctgctcctggttgactcattctggctggaggcataatctaatgtgggaaggtagtaacaggaaaaaaaaaaaaaagcgagaaagagcgactgtgcctgtgctgaagccctttcctcctcctagctcccaggcagctagaaaattgcctgtctgaaagaaagtagctgttttccttaggggactgtggtgagtgacaaatgagatgatatatgtgaaagggtaaagagctataaaaatgcaagattctattacttaattagaatccttcagcctatttatctgtttgagtggataaaatgtcctctaggtgtgggatagtggggcaggagtacctggtgaagaagtaccagctgtgggataatgggatgtgtggagtaatgcagagggtgtgtgaagatagtttaggggtgcccactaatactgtcacctggagaaacaaccatctgtcatttaggttcatcttatttgggtaagagattattcagttccactgcttccctcgtctgccactcatcttttgagctttttacagccaaacacttttactcaaaaatgggcctgaagaggaacacaccagtagcttcagggatatattggttaatttgtttttgtttggttttgtttttgagatgaagtcttgctctgtcacccaggctggagtgcagtgacgccatctcatctcactgcaacttctgcctccgggactcaagctattctcctgcctcagcctcccaagtagctgggactacaggcacacaccactacacatggctwatttttgtatttttggtagagacggggtttcaccatgttggccaggctggtctcgaactcctgacctgaagtgatccgcctgcttcagcctcaaagtgctgggattacaggcatgagccactgcgcccggccacattggttaatttggttgagagcgggctcgatgtgattttattgatgataatgtcttcaatttgccttgccctcagtacaaagcagcatgttgtaccaagggttctgggctgagggacataactagggaagactgagctgtgaatttgtcccctcagtagaggatcaccctggccaagttccagttcatcttggagccttattttacatcagatgggaaaagaccttgcaggtcattcattgtcttacatgcagagctcgcatacctgccacagggttacccagcccccagtggacagagaatttgtcccataccaaaatggctgagccacccaatccctctagacagcccctatgttggaaaattctttatgttgaatcgacatctgtttctctacaatttgcactcattggagccatacagaataaaatgtctaatgctgcttccacaaatatttgaggactgctaacacatttccttcttctacttactccacaaggcttcttttcttcaaaccaaacatgcccatctatttcaaacagggaggcagtgtggagtagtggaaagaaggccaactttggagccaggcacatctgcgttcagttcccagccccttcacatcctaacacttagcgttccgagctgccgtatctctctctgaaatctgtgagtgaaaatactcatctagccaggctactgtgaggatcagggatatgttgggtgaagatccatgctcatggtaggagcttaaaatacgagaactgttacaccttcagtttgcaattcatttagttgaccttctctgaacacattcctatttgtctctgtttcaatatgtatctgctctgtagaacagaataaaatgctttctgtgagttctaaccagcataatagagtaggattagcttatttttggtacttcccctcagtctgcagtcacagtagcctttttaagggtcctgtcttactgattcagtaagtttctcaaccaaaaccccttcgttaatatgtgctcctgttcaaccaagtttctcccattatgaagtgttttagttgatttgaatctacaatgatggctcttgaaagtggcagtcccggttgtgtcttgttgtctccataaatatcctgcacttgtcatattatgggtctcaaactggggttagaaaaatatggttcttgaatctgtggtaccatctctgctgatcccataccactgttgtgaatcagcgagataataaatgcagagctttctacatgaatttttgcacagatctgaggtcttatcatgaggcggaactgtgttagacttggaatgtgacaagaatgtgtgataagccactggctgagggagtactactgcatgagatatcctgcacagtccaggatagcatctgtccagaggaactgaaagggtgcaacttcgagcaagccagagccgactttgaatttatgtgtggctgtgtgttttctcagggctccaagtgttttataccttgggtcaaattctccccctgcggaggaagctcctttctggaagtaaatcaggcacatttagaagattcgttaactctttggctcctgggggattatggccagcattttctctcttagacttcccacagcgaattcctggttgggccaagctgatatctttgagctgacttctgtactcagggttcttccaaacaggaatatgctttctctgcctaagatctgggttccatgcccatctcaacctcaatccctccttcaaggaagtttttcctaactcctcggccagacatcaataatgtctgaagggaggatttctcccgagtgccagacttggaattcctgttgtcttcaggagctctccctggcgctccctccttcccccagggcctttaaactgtttctcctccagtctgcccacttgatccatgtgggtagacatgttccatggccttcagaataagatcttttgtggggtactcagtccataaacagaaaattgccttcatcttggatgctggtgtttctggcctggtgagaatgaaagtgtggaatttgtttgtaggactcaaagtttccattaacaataaatatgaaaaatatataatgcaaaggcttttgttattgttattattaaaataggaaagcctttacctttttggaagaaccgatttagattttgcagagtaattcagtctttaaaaggtagtggtagttaaaataggtaatctttgacttgtaaagagactaatttaaattttgttaagtaaccaattaaggccataaagagtttaaatccatctgtggcttctcattttctctagaacaaattcctaattccctacgatgaaattctcttgctatcctaattttttgccggctcaaaggactwmccgttttccccaaacacgcggccctgagcctccggtgctttgcgaaagccgtcccctccggctggaatgttctttgtctctctggtaaatgtctattcatcattcaagaccacccttcgcccctccccttaattacttcctcccctgtgcgccctcaaattcttgtactcattcaagcagtatytattaggggccagctttgtggccggcaccgtggcgggctctggggctacaaaaggtgaataatacttgggctctgcctctgagggccttacacgttagggaggagtgggtcaactgccacaaacgtcgctaggaaattaaaaggaaaattttacaaagtggcagttcttgtctgtcttcccctccagatggcccgtgtgttgttttcgggccggggctatttctcatttatttcgcacccccggttcttagtgccctgtaggtgctaaatcagcatttgtttcatgagtgctttttctgggggcaaccagacccctgcagaagtgtacctgtgttgtgccagaggttctgatgataggcttataggcggtagtttcctcagtgtccgtgggtcgcccccggtcccgggttggatgccccgcggtccagcaccgaacctttcggggtgcagagttgcagagccgcggagggcccgggccgtgcgcagccgaagggaggcctgcagcgccccctctggatgcagcgggcaccggcyggccgccccgctcacccgctcgcaccccasgtttgttcaccagtatttcagtttacggtcagaaaatgaacacagacacttcgtgatactctacacttttcaaaggcgtaagggatgccttttaaaggattatggattagaaaaattcctccctctttcttgtgcctctgggcccttgcattgtgattctatcttacgtaaataaagggggctttgctctcctaattgtgcccactgttctgtgcagcgcggaccggcgcatgcagcgagcggggctgcgagggcgctgctgtggccaggcgtctggcatgctgaccacgtcgcgctgctgtaaaggaaacctgccccgsgcagcggcggtggctggagcgggagaaaccggactttgtgcaactttggccatagtggccatcccatgaatctgtttactagcttggtggtgggtccaacagagcttgttgctccctagccgcttgctcgtgcccttggtggttaccggtagttaagcttagggcgcatagggccctcgtggctcgccacctctcacggttcagtacccacgcttcgaacgagggatgggagcaggcgccacggccggcaccccagagccctgctgccccttakttcgagcggccatcctcctgtggggcttgtgggcagcctgtggggtttgtgggcggcctgtggggtttgtgggtggtctaaggaaagagttggggcactcaggggtctgctgtttttgcccgtggccttaactcatcaggggagggtttctgcagcagaatctcgggctcagggttggcggttaacgagggagcagcggggtcttggggagggggctcgacacccctgaaggtgccccctaaaggagccactgttagaggggcaccccatctttgtggccatggcggtggtagagcggctgggaggggctctgcggcgagcaagggagcaggcggtaggggttctgcggcgatgggcgggctaggggcggggcgcgggtgggctctaaaagtcggtgcccactcgctccgcgctgccgcggcaaccagcacaccccggcacctcctctgcggcagctgcgcctcgcaagcgcagtgccgcagcgcacgccggagtggctgtagctgcccggcgcggcgccgccctgcgcgggctgtgggctgcgggctgcgcccccgctgctggccagctctgcacggctgcgggctctgcggcgcccggtgctctgcaacgctgcggcgggcggcatgggataacgcggccatggtgcgccgagatcgcctccgcaggtgagtgtgcggtgggaacgagggggtgtggctggcggccctgggactagggcgcaggcgagcggaggactgtgtgcccgtgtccgagctggggctgcctctgggcgaaaactctaccgacaggcggcacgcattccgcgcccgctctgcctacttgaggagggggtgtcactcctgcccgcaatggaatgttcagaacgcgggacctccttgggttaggatttctagaccccgggatcgtcgtggtgagatttaggatttctggaccccagcgtcatcttgatatgacttaggatccataatgaccctggtctcaccctgatgcgaattgggatttttagatcctggcatcaccctggtgcgatttaggatttttatactcagtcattgctgcagcatgatttaggatttctaacccccagcatcgccctggtttgatttaggatatttagactccggcttccctctggtgcgattcaggattcttagactccgccgttgccgtggcgcgatttaggatttatagatcccggcaaagccctggtgcgatgtaggatttttagaaccccagcatcgctctggtgcgacttaaaggataggccccagcatcgccctggtgcgatgtaggatttttagaaccccggtrtctccgtggcgcaccttaggatttcaagaacgggataatcgcagtgccgagatcgccgcggtgcagcttaggatttcaagacccaggtatcacggtggcgggagtcaccgcagtgactagaactcgcagtgcccgtcagccgccttaagtatttttcagatttcagtaacaagcgcgagtgagaacggcgatgtgaccaaactgtcatgttgcgcagggattgttcaccttggtttcgcgggttttcaaagtggttcgtctcgcggcgacgccatcaggtgggcggcaggttgggtggtattattacgggagtgtgtttttctgtttacaagatgaagaaatcaaggctcagaaatttytggaaagtttgttactggagtttgcttattgtctccgctcatggctcatcaaatagttgggattttggccaaaaaatgtttgcttaacccattttgcctactgacggctaggttgcttcacttctaaaaatcctaaaagttcatgggggcatttttactgaggtaataagacaaaaaatggccccctgagaggttgcctctttgctttcttggagtaagaggaggagggtgtggaggggggtgtccaggagtggagtatgttggtcgatagcctcgttttttaaccccccactttccctgagcagcggcggggaagcctccccatttgccgctctggccgcccctcccggggctctctgctgagtcactgcagagattcagctgctggaaccccggggatgaatgcgatgagaagcactgggggaaaggagtaatgaaatctgcacatgaaaatgtatacattgaagtacaggacagatagggctgggcaaatgatcgtcaaaacctaatggtttttgtcatctgacctttcaaggagatactgggatacagcctgctattgttgggtgaaaactgtgatataaccatcatgttctggcacttttttgaaccatttctagtattaccttgagaagtaggaccaaatggttctatccgtcttatggacaggtactttggagaaaaaaagaaatgactgccctaataatgcctaaaaaatagcctgrggagctgacattgtttaagaaacatggttattttaccactgtaaaaccacaggcttgtttttagattttagcaaaaagtatcagggatatgggggggaaaagtatcttgtaagttgaggaagttagcgaacgggtaggtagattacaggcaatagggaagaatgtgtgtacagacggaaagccatttcccccagggctttagcaattaatttatttcagctctatgacaactctaattttagttttggagggtattatttccattctggctgttttgagagaacttccattctactgacaattcttgatctgttgaccatcagaagtcatagacttgaaacagaacggtttataattcctgtttggcactccttgtcaatgtggataaactgacttgtgcctttgaagtcctgggcatgggagggttgggtgtaccaaccagtgctctttttccaaagacaaaatcaattctcacacgctgggtatgagttatgccttatctgggggtgggggagcatcttaggaaattaaatggaaacttaaagagtctgctaagaaaagcagaaatgtaatctaccgccttgacctctcaagagattagatattcagggtcatgacaaagctgcttatgttggaatacacagtgcagctatcttactttcacagactgtttaccctgagcagtttctcagcccaaatccagaaaggagtactaaatggggcttcatttaggcaggagggctgaaaatcaggagtagctctctgcttgaggacatgtgataagttactacacacacacactctttaaaacatgagatatagcacatatatattttttgaacattttactggttgggggtagtgggtagatggtagagcttttggagtaaataagaaagaagttatttttttcctgggaagccttgataaaagtcaacgaaagagtgtccagcatttaagtcatgtcccttttatttatataaagtcctcttcagcaggtattgggaagaccacaagggtaggggctaaggggttaaagtcggggagcagaggcagaagattatatgttgaaataatgtattttttttccttaagattagaatgatgaacaaatatggtgagtgctatggcagacagaggtttgattatagtctcggtcagctttgtgcctatgtgaagggcaatgtaatcattgcatggtaacagcaatctcccaccccatcttaccaggttttggtttgtagatgagtggacaatgttacctgactgcttacagtgggtctctgcttttcctacaggatgagggagtggtgggtccaggtggggctgctggccgtgcccctgcttgctgcgtacctgcacatcccaccccctcagctctcccctgcccttcactcatggaagtcttcaggcaagtttttcacttacaagggactgcgtatcttctaccaaggtaagaagtggactattggaagtcctgcgtgtatcggtcacataagtcccagctgaggtatttattttgtggctattggtctcttgttgctccttaatgatggaggagagtatctctctctctttctgtgtagtgtgcttgcagagaagcgcagaaaactgctgggagaatgggggtagggactgagattccaacctgcagaccttaccttttagtataagttttctttgtagcttgatatgtattccaatattagtttttttttttttttttttgagcaacctgtcaggtaatatataaaatattaatagatataaccaccattggttctctctccttaccatccctgatttcattttttctgtagattatttgtagtgtaactgtgatttaagtcttgataccattatataaattaatttgctagtgatgatgattattatgaccactacttatcaagtaattaccatatgccaggcactgagttatgttttcagccttcattgtttaatctttacaacagcatttggagataggtgccattaacctcattttataggtgaagaaactgagaaacagattggaaatgatttgttttgagygggggtcaagagcaataacgaaaaatgtttgtcataaaccgtttttcattattgctcctgacctcctctcatttgctatattcaattaagtaagtayacaattwttattatgttggcttgggttacttccagttttactgttttaraaaactaatgttgaagtaaaagcttcatgtccatacagtttattttttccttacattttcaaactatactacttgtataaatggaatgattttatttgcacagattctcaagaacaaaactcttaggctaaagtatatacaatttttaactgcttctaaattatttttgaaaaccttattaccaaattttcatgtcactggcagtatatgaatatacctgttctaatcccatactattagcaaggttaatattgtctaaatgtttacctaatttagatgatgctgaatgcttccatattgtcatatgcattaaaaaagttcatgtttatgttgattaagccctttttatagttgacaggattttgtaatagttttattatgtttttgatgttagattgggtctcctgctgaataaaaagtgctgagcaaacagcataagctaaaggtgttccttgggaatagttgctgtatcttagagaatttctgtgaggccattcatgataaagtacaaagaatttgtagtttatgtgttgtgatcatatgcttttaactgaaaatttacttttcactgaaaaaatttgcatattacagaacaaaaggagaaatggggagatgctgtttaaaaacacctaggtgaaagtaaacaaggtgccttcaagtattttcacatagcatgatttttacaatgttttaatatacagattgaaaggagaaaaggcctgttctcacctaacgcagttaagcttacattttacaaataattgtgtcattttaatgtcaatttggtcacagttkcttgttctttgtatcagattacttagattttaacatcttcgaggttatttttatagggatttggcataattgattgtactttccttcttcctagactctgtgggtgtggttggaagtccagagatagttgtgcttttacacggttttccaacatccagctacgactggtacaaggtaatgaagtcagacttctacgtcctactatgtcttaaaaaatctcggccgggcgcgggggctcaaatcctagcactttgggaggctgaggtgggaggatgacctgaggtcaggagtttgagaccagccaggccaacatggcaaaaccccatctctactaaaagtataaaaattggccaggcatggtggcacaagcctgtaatcccagctacttgggaggctgaggcaggagaatcgcttgaacccgggaggcagaggttgcagtgagctgagattgcaccactgcacttcagcctaggtgacagagcgagagtctgtctcaaaaaaaaatttttttttaataaaaatttaaaaaacctcaaggattttgttgtcagcaccagaaggctcttgcacatttgaattgcttttaaaaaaacattaaatgttgaactgttccttatttactgaagggaataaacaactccttggcactctggaagggatcactgccaagttaccctccctcaacagggattaattaccaggaataaagcattttccaagaggatcatctgtgggacctgtggtagtttcatggcgttttctctttatggaagtctgttaagccaagatngggctgaagctcctgtgcaactgtaggtctggtgaaagggaggggcaggagcagaaagcccaaatcatcgtttctttcttgtagatttgggaaggtctgaccttgaggtttcatcgggtgattgcccttgatttcttaggctttggcttcagtgacaaaccggtaagcagcacctatgtggggctggtgatggggtgtgggggcagacgcagactatgagggtcaggctggcagagagagctgtcctcatgacttcatcctgtgtatgtgggctttcctttcctcagagaccacatcactattccatatttgagcaggccagcatcgtggaagcgcttttgcggcatytggggctccagaaccgcagratcaaccttctttctcatgactatggagatattgttgctcaggagcttctctacaggtcagtggagcttcagacttcagcttatgatgctaggagagtacattgtttctggactgtttgtatcctttttctctcgttttcagcggtgcactggtttaagtttgctcagctacatgtgtgtttcctcgtctcccttctaggtacaagcagaatcgatctggtcggcttaccataaagagtctctgtctgtcaaatggaggtaattgccttggcggtaggtagaaagtgggtgtaatctagaagggccatctttagatacagcggcacctaaatggtaatctgataatatttcaagtagacataattaaactatgggatctctacctcttctgtgccatcaactcctttggtggtctgacaagatttatggaccctttctcagaatgttttaaaataaagaaacaaacagcattacaaaggatagtgactttacttacatagtcaataaaaagctgcattatagtcacatgtgctttttcaatgcattagatagcaagttctagtggaggacctagtaacagctatatcagaaggagtgaggagtgtaaagactgtttgccatatctgaaacaactgcaataggttatgagagtgtaggattgaagatacagaaaaaagccacaagtgtttctaatactactatgatgttagtgtagaaaatccttacttaatgtcatcaatgggttcttggaaactgtgactttaaatgaaacgttataatggaaccaattttttttctcatcaatgttttaaagaaaggatgttattcaaggacctgctgtacctcattctgcttaaagccgaagtttccaagaacctatcctgatgttaagtgaggacttaactgtatgagattccccaactcctaactgatggcagtgccaagtttcagttagaaaataccgaacccctgattagactttctgggtagccagcttgcaagttcatgaatatccaaatgtctcctgaacgccttaagagcagactgggagagaaatccgtctctccctttatcacttatgctcatggctttcttccactgactctgaagagaaagggaaaaggaaaaactctagggtttttaaaggacctatacttatttaaaaacttcttgttttattcttacagcccaaatcattaaccctcgtgttctgagtgatagggggaaatgctaaggggagtcagagcctggttatcagcattttggatgaccatatattttctccccgtttcactatctttaagatgggaaaagtaattccagtgggatttattgtgaccagttaaacacagaattcctggagaagtaattagatgacagttttaaattgttatttgtaattctgttttggtagtaaaggctgcagaggtgatggtgaatagggtgggtagtttctgataatgggcttgcctttgacctaaatgtaggtaggctgggtgaggtggcttgcacctgtaatcccagcactttgggaggctgaggtgagaggattgcttgagctcgagaccagctgggcaacccagtgagatcccgtctctataaaaaaaaaaaaattaaagctgtaggtaaatgactaagataagtctcttctacaggtatctttcctgagactcaccgtccactccttctccaaaaggttggtacttcactgatagacctttagttttaggatttgtactgacgtaaataatgctgggaccttttaagggccatagctcctgtaactggcagtagttaaatcctcttccttgtgaatttctattaatgaagttactttttcccttcttaggcaactaaagcagaggcagtggcccctacgtaaacccaaaaccaatcctaagaataagagatcaacaaatatttggagaaattacagctatggaaagatctgtgtcacaagcttgatgtttgaacaaattaggatcctactctaaacttgaatatatcagagttaaagttttagggatttagtgaattgtagaaaagtaatcttagatggaattagaaatagatttgtcttccttgagagaagaatgcgggtaggcaaaacaaaatgccaagtaccaaaccattcagtagcaggagatttggctaaagatttagttcctagtataaaaccttttgccccggtgaggatyttcctctgggttcttgagctttacctccacttattcccctccagctactcaaagatggaggtgtgctgtcacccatcctcacacgactgatgaacttctttgtattctctcgagggtaagtgtcactgtcaaagattgtggcctagagcaatgtcgtgaaaagttgctgccattacaattctgggccaaatcctaaggcttgatattttaaagcaaaggtgttggcygcttgccagggaagtagaaggaattcataaatcacttatgggtcagactgcatggcccagactgcatggcctctgaggttccagccatattgaacattctgagttctcctcacacttatcttcctgcgttttggactctttcagtctcaccccagtctttgggccgtrtactcggccctctgagagtgagctgtgggacatgtgggcagggatccgcaacaatgacgggaacttagtcattgacaggtaagaagttaccctttgctttggtttccagagamgtgtttttgtggagagtggggattgcttgttctgttccttgctggcttattccctatcacaggaaggctgatgatgacctatggggcaaaccaaaaagtcatggtctatatgaagaaagaaatagaaaataagagtgaaactggactctttgttagtattaaatgcttcaaagtattgaatcatggttgtgaaagtagcctagtgcctccctcaaggtacaaggctcttccttttgcctatctttctgcagcaacggggagtgagagggcagacttctctttctctgtcttgtacaaagaattcccatgccttggttcaaatgagaatgtagacactttcacaagggacccagaggtggtgatagctgtaactacttgggataagactctgacttctagccacctggctcagtgtagcttccagtgtttttactgatggctttgctggggattgtatgttagagggagccaatcctcccaccctctcctaagccccaacaggatccctgaatatttcattttagtattaaaaaactgaagaacaattaagactgtcttttaaaattatattttcctttccaaaaagtaaatactatttgtaagatgagatatttgaggttcacaaaaataactgtcctggagttgccaggcagaatgagtagaatacatgagtttgagttctaaaatgtggcagtggtgtcttacgctggagaaagaggaatcctctccattttatctgtggtcagatgaagctttgtgctcatcaacatctacacttagaattttgaagtagatgtcggctgggcacagtggctcacgcctgtaatttgagcactttgggaggccaaggtgggcgaatcatatgaggtcaggagtttagagaccagcctggccaacatgatgaaaccccgtgtctactaaaaatacaaaaattagccagtaattccagctactcaggaggctgaggcacaagaattgcttgagcccaggaagcggaggttgcagtgaactgagatcatgccactgcacttcagcctgggcacagagtgagactccgtctcaaaaaaaaaaaaagaaaaaaaaaaagaagtagatgtcaacacagaagatcatgtgttacaatcctcttattttaaaaatgaggaggctagccaggtcctttggcacatgcctgtactcccagctacttgggaggctggggtgggaggatctcttgaggtcagaagttatagctgtagtgagctatgattgcacctgtgactagccactgcactccagcctaggtaacatagggagaccctgtcttttaaaaaacaaaccaacaaatgaggaaaccgagttgaaagatctgtgttatatgtttgagtcagagaggtaggtagtggtggagcctaaattggaacctcagacctgggctttttagttacataaaatccaaaccaactgtcagccttcctagatctcattccctgcttaataaatacacaaacccactaattcttatattgatagtaggcataatcactactagagctacatggtggttaactctagaggttaacagaaatggataaattaagtgggacatttccaggaatgctaaactgcttctggattaagaaattgtatcttgtgttccttgtggctcgttatgcccttgaatccctgtaacagtaaaggtttcttgttctgcacatgctgacttacctgtcctacagtctcttacagtacatcaatcagaggaagaagttcagaaggcgctgggtgggagctcttgcctctgtaactatccccagtgagtatttttgtattattgataggaaactgaaggactatagggttaaagtaatcgcaactcctttatacaattagggttaccagatttagcaaataaaaatataagatacccagttaaatttgaattttagataaacaacaaatgcttttttagtatttaagtatatgttgtacaatatttgggacctacttacaccaaaaaaaaatcatttttcacctgaaattcaaattttctgggtatcctttattttactggcaactgtactcatgacatctggaacagtgatgtgtgtgtgtagagtgaagtatataaaaagctgagacattactgtaaaggtagttggtattactgatttctgtggtgtgcattgtcagtgactgccacattacatgctgaattgctcggacagaaggctgtttggattactaatcaagaggctataggtggtttgtgcttatttgtcttttcattcttacagatttaaaaaaaaattatggtgtttcacacayagtgattagtgctcaggaaattattggttgatttcaaatgtcaagggtctgttataactgaagagagacttaaagaatgatagtatcctggacttagaggatgttgaaagttgggcatatcccatttggtccagggtgcaggagagctggatgagggaccaaatggttgtctgtaggaggagatgtgtccaatgaatgaactggtacgtgcctagcagttttttagaggttacctaataaaacaagctaggttttgtatcacacaaaaaattatttatagaaaatattttcttgggctgggtgaggatgctcacgtctgtaatcctagctttttgggaggctgaggygggaggactggttgagcccaggagtttggcaccactctgggcaacatagtgagaaaaatttttctctacagataatttaaaagttagccaagtgtggtgttgcacacctgtatgtagtctcagctactgaggacactgaggtgggaggatcgcttgggccaacgagtttgaggttacagtgagctatgactgcaccactgcactccagcctgagcaagggagagagagaccttgcctattataataaaaaaaggaagaagaaaacatttcttttcggagaggagttaattttagggtgggagtagaacagatgtgagagctgttaagtatttcattccttttctcttttctagttcattttatctatgggccattggatcctgtaaatccctatccagagtttttggagctgtacaggtgagtctccccgagagaagtctatgttttgttagtatctcatcctgacagtggtaaacagaattgcctgttgagggctattggctctagccattgtctttaacctcgctggctgttcatccaggaaacaataaaaagattgagttgaggaatcttattctaacataattgtagtatcaagacattcagttatacgttctcttgatttatacatagtctgttttcactgtcatgactgctacatattccttggtgtacaaaaagctctcatgtgagtcaaaggttgaaagtggatatacctacaaagtgtttgtttgttttagtctgattgtaaagccaattcattggtttaggctgagcagatggcaaggagagattgagaagagctcattgtggaaaagtgccttctcattggttgctattctctctaggtacttacttggaaggtatcagaatatgaaatcttgattatgtcacataagaatgttccataccttcctgtggcctactggatacaagctagtagtaaacagcttgcatataattttaaataaaataccccctstctcatctcctcctgggattaagggaagatccttggttatctctgcttgggcagtgagttgctgtgtgatccacttgtttgatgcttcatccttctctaaggagctgaaagtcatcttgctttgacaattgttgcaaaagtgttatattttcaagttgttgtttgttggattatgaacatttaaaaactagtttgtataaatggaattggcaagtttatctgcctaagatacaatttcagagtagaaggtgaataagctctttggtggctccttccagtgtggtgtgtccacagggtcatttactggggcttcccactggcttacatccctcccgctccagcctcaagttcacctgcgtgctgttctcttccactaggaaaacgctgccgcggtccacagtgtcgattctggatgaccacattagccactatccacagctagaggatcccatgggcttcttgaatgcatatatgggcttcatcaactccttctgagctggaaagagtagcttccctgtattacctcccctactcccttatstgttgtgtattccacttaggaagaaatgcccaaaagaggtcctggccatcaaacataattctctcacaaagtccactttactcaaattggtgaacagtgtataggaagaagccagcaggagctctgactaaggttgacataatagtccacctcccattactttgatatctgatcaaatgtatagacttggctttgttttttgtgctattaggaaattctgatgagcattactattcactgatgcagaaagacgttcttttgcataaaagactttttttaacactttggacttctctgaaatatttagaagtgctaatttctggcccacccccaacaggaattctatagtaaggaggaggagaaggggggctccttccctctcctcgaatgacgttatgggcacatgccttttaaaagttctttaagcaacacagagctgagtcctctttgtcatacctttggatttagtgtttcatcagctgtttttagttataaacattttgttaaaatagatattggtttaaatgatacagtattttaggtatgatttaagactatgatttacctatacattatatatattttataaagatactaaaccagcatacccttactctgccagagtagtgaagctaattaaacacrtttggtttctgaataaattgaactaaatccaaactatttcctaaaatcasaggacattaaggaccaatagcatctgtgccagagatgtactgttattagctgggaagaccaattctaacagcaaataacagtctgagactcctcatacctcagtggttagaagcatgtctctcttgagctacagtagaggggaagggattgttgtgtagtcaagtcaccatgctgaatgtacactgattcctttatgatgactgcttaactccccactgcctgtcccagagaggctttccaatgtagctcagtaattcctgttactttacagacaggaaagttccagaaactttaagaacaaactctgaaagacctatgagcaaatggtgctgaatactttttttttaaagccmyatttcattgtcttagtcaaagcaggattattaagtgattatttaaaattcgtttttttaaattagcaacttcaagtataacaactttgaaactggaataagtgtttattttctattaataaaaatgaattgtgacaaaagtggactctggcttcccctcccccctcccccccacccctctgggataaaaattttccagcattgccaggagctttcaggtacacattaaagaataaaatgaagttaagcagctggagtataggatagtatttgattttcaagatcacccaaagctgcactatcgtcccaaagctgaccaagtagaataaaaaraaaaaaaaaaaaamcaacccatgcgcaaagatagacatttgcttgatctgctggctcagggccaaatgtttaatttgcttctccaaagtcattcatcttcaaaagtctgattctgggaaactgatgccactagcctaaaagcccactgaccatgtagtgtgcatcagtttcctcttgtccagtaagcatttatccaacagaagctaagataacatctacaggtgttctctctttacttctgacagtcacctgcatggtcactccatcggctaaggccagcctggacctcaccaataaatcatagccacctctgaatatacctgagagaaaaaagtaaggaaaaccatattaagaacccaaaacaagcactggataatgaaatttatcatgctatccctgcatctcctttctattagtttagtttagcttttccagagacttgtggaaactgaatcctaaacaaacataaattccaaatatatatatttttatattcccatgaaaccaggtacatagaaggtattcaaaaataccaatttggagtactcaaaaggaatgttggtggtggccttggtatctgttggagagatttgttttgggccaaatgtacatcttaaaagaataaccaagaatagcatgcaaaacaaattattcattttgactgggtatcaaattgttactcatataatgggatgatgggacaacagcaaggcataagatgcccatctatatcctattattaagctttgcaagaaaatggaaggaaaatctgatggaagcttcttacctgccagatagagcgaatgggaattcttgttctcaggtactttatcggacctctcacatggctgcatgcccagaaatgtgatgatattgttgacagcctctgtgttgagaagatgtatgagacagtattaggaaagtaaagcacagggatctccctctgcaccagtgtatgctgggagctggggtggaagggtttgttggtgaagggggttgttggtgatgtgtagagggaggctactactggactagaaaatggctgatcaattagatgatgaagacagggtgctggccttttaagtaagagatttatgaagtttttttttttttaaaggagttcttctggagtaacaaatatgcctgttaggtgttatactgttatcaggcaatatactgatagcaaaatgggtctcaccttcaagggttttggtagaactgagggcaaaggtttcctctttctcaaaggtatctcccacctcttcccaagcagcagcaaagttaggcttcagtactttctgaatatggtcagacacagtcacttcgagatcttccagctagtgggtaataagcagtcagtaaagaaaagtcctttctgttatagggcaaagataaaggaactagtcaatatggtcctccggagcctagagaaaactctaccaccaaaatagtttaagttctgtagtctggataaatctaatgttgtagcccttagcaaaggaaagcaagaaaacagaacatctggcaagagcctcagatcaacatctgtagccctgaggtacagagtagtcatgttgcacccacacttgaccactgagttctgggcacacggtaccctctgatcattcactaagaggttgatattttttaaaaaaagttttccctccattctgtgaaggctttttaatccatgatctggctataaactaacagctgctgaagcaaaaacaaaaaaccaaaaaacaaaaccaaccccctccccaaatcattttaaataaaactgatctcaatgaaaatcatgtcattattttcatctcttaattatccctattataaagaaaaaaaagggtgagtttgttttaatgatgaagtggtaaatctcaattctctctggcctggtgctgtccagttacagaggagggttagtccaggtcctcctaatttgtcatctgtttcagaagaatagaaatcccttaagtttatgtcagatgctcctagaaaaatgttctctcaaggcagaagtcacttagtgttgtgaaggtgtcaaagaaagtctctatgctgggaagactcaccacatactcatcatcatacccatcctcatctggaactccagtgttagggtcacagtcccggactgtaaacttcatggtgcagctaaaggagcctgcaactggagaagaagggaggcaaacctgcatcagtggggagtgcaagggagacgtttccatcatttcttaggaagtgccatctgtactcagcactgtgttccacattttccagttaaacacacatgccctgttgtctggggtagtggttctcaaaagcagcctacaagcgggtcaggaaggcagtctcacaaagcatgaatgtaaagtctattccacgctgtgggttacagcagtacagaaatgataacatgggcagactgtttctctattggtatgaagaaagcagcagagaggtacttttgggggctttttgccatgcctatcaaaggggcctaaatgttgaaaaataaatattttgagaaccactgctgtaggacctgaccaaaaaaaaaaacaaaaaaaaaacctgtggtaaagagcatacagatcatcagattaacattgaccaatctcatcagcatctcaatactatctttagattgtggactgatggcgggtccacagatcaccagagagaacttgctttatctgtcaaccttcagcctaaagtgagtaggtcagtaatgagtttctactattggtaaagtcagtgtcttaaatggaaaagcaagtgggcagttgtatgttttcacacaagtggtgttaagtaataagaaatggaggtgggggtacatttttggaaagtgaagtctttataaaaagtaaagacagtattttctgaaatgtttgaaggaggggatttagcaagcagggatgaagaaaaggcatttaggatcttgtctatggtctggaaaaagcttataggtacaaaaaatattagatattgggagagttaaaaaattatttgggggataggcaaggagaggaaagaacaggctcagatgtgaagaccatatacgacagattgggtaataagactttcatctgctcagtcttgactttaaattccatccattcatccatccacacatgtagtgactgtcaatacatgttgacattacacgtaaaggtataagcttatgtgccagacacttggataaaaagatgactgagacatgatctctgtctctaggagctgtctaggagttaaataagtgtgtgggctgtgtgtgtgtgtgatctatctatgactttacaactcaatgccatagatcctttaagttttaagagagtgccatgtgagggtgcgggattaacaaatagcctgggaaaactgtaaaaaatgtgaaacgatataatagtttaactggctctcaaaagatgcaaaagagctttggcaagcagaggaagatgtacaaacaggcaaaaggaaagaggccagaaagtccaccgggcagctggaaacagtaagaggcatgctaatgcctaggtgctgagaagataatttgtttaggaataaattgtaaaataccttgtatttcaaatgattttccaacaggctctggtgagctgaggcagtcaagagattgaaaggttagagataagctagataaggtgcctaatttaagccactggtggggactatgaagaatgggtctgaattcagagagcagatggattcaacagaatatgctgaaaacagacgatggcagtgggttttcccatataggaaagaatgaacctatcaagcctgcagaatcaatttcaatgccattaggggttgagaaaagaacgactgtggtttaattaggataggattttcttcagagagaaggggaaagaagtgaaagttaacacaaggccagaacaggtcaggtgaggcattttttttaaaccatgaaagagatacagaatatggtaggggaaaaggtcatgatcaagttagaatgaagagtcaggagagacattaattatagcaacccagtgtggttccaattaagcagagaggctacagcaaatgaggaggacaaagagacaacatcaggtatgaaggcagatcacagactgggcacaggggctgagttttatgtggaggtaaagacagaagacacttacatataaggacctgatacagagaaagagattaaggaagtaaataggaatggtgttagtagagataatgttcctgggaatttttttacttaaatggtttgattgatacaatgagaggttacagggatctaaggaagtctaggcagtaatctgtcgaagctgctggagaggatgacgaaatggggcgaggaggcaagatgcgggggcctttccatagcaagaaaatactgaatgcactgccataatgtaaatatgagagttacacagacaaagcaaggcaaataccaaagagaatcaggaaagaatgccctgaagatctgcattaaaactgttctctgaaattaagcttgtcttgtgaggattcactgaaaatgagagtcaaccactaaggagatttgtatgaaaagaacccagcgaattagagaaaagatagatgctggcagctaagacaggagagggacatgtgagttgggccagggtacagaaaatgcagtgtggcaaagggcagagtgggaaaggtgggagggagctgccaggtctcaaccacctgggggagaccatgacaaagtaagagacacttatgaggtatttccrgaaagctttgttagaataataattaaagaaaagggtatgtcactagggcaaaagattagaaagaaggcaaaagagatggatctgtacaggctaactgcagcagtctatgcaggtctggactgaactgagaagcaatgggtgcagcatagtgtgtaggacatcgaggaaagctgggcagtgagtgccaaaataagcaatacacacctacctggaaaatcgtgttgagtctgtgggaatgctgtacaaatggtgggagggagtttttctctaggacaaattcagaaagggaaggaggaatggtactggaaagcaacattagagttgtcctcagatgaaaaggagttggtcactaaggaatgacacacatcaacaggaaggtaagacagcattgctgggccaaaagtcataagagagtatgaaataagagactggaagcaaaggaaagaaaatattacataaggaagggcctactggcagagcaggtgtggaataaagatttagaatggggtatcctgtctaggtctaaatggtcggctgcatgggaaatacacagaaagggttaaggagcaaggaattcagtaggaggcagcagcagactagctcttaaagcttttgagggaatggctaattaaaggacttgcttgataggaaagttataaactgatgaatgctgataaaaagctatagatgggccgggtgcagtggctcacgcctgtaatcccagcactttgggaggctgaggcaggtggatcacctgaggttgggagttcaagactagcctggccaacatggtgaaacactgtgtcttctaaaaaaaaaaaaaaaaaaaaaaaaatttgcggcaattatgaataacagtactataggcatcttgtacagttgatcctcgaacaacatggggttaacagtgccaacccccatgtagctgcaaattcacatgtaacttttgactcccccaaaatatcactaataacctactattaatcatcttgttgataacaaaaatagttcattaacacgttttatgttatatgtaatatatattgtattcttacaataaagtaagctagagaaaagaaannnnnnnnnnnnnnnnnnnncctggccaacatggtgaaacactgtgtcttctaaaaaaaaaaaaaaaaaaaaatccaaaattagccgggcgtggtggcccatgcttgtaatcccagctacttgggaggctgaggtaggagaatcacttgaacccaggaggcagaggttgtggtaagccgagttggtgagccttgttaactctccttgttaatacacaactctccttgttaatatacaactctgacaatttaacatgagccaagccccattgcactccagcctgggcaacaagagcaaaactccatctaaaaaaaaaaaacaaaaaacaacaaaaaagctatagatggcaactttagaaa

SEQ ID NO: 94252 - DNA, 57569 bp, Homo sapiens
ttgcagtgagccgagatcgcaccactgcgctccagcctgggcgacagagcgagactctgtctcaacaacaacaacaacaaaattaagcccaaatctaaaacagggacccaagctgggctgctggatcctaaccacaaaggacagataagctcccagcctgtttccctccctccttcccattaactaataaaacataaactcggcttcctcacctgcagtcagcttccaccttccatactcccctaaacctgctcttgccaagataatcagttcttactgctacatctaacacttttcagtcctcagagacatttcacacacgtgatctccttcagtctctgtctctctgatttccgggaggccacactcagctggtgttcccgctctgaggattctttctatcccttttttcagggctctctctcaatccagattttaagcctggtaccccttggggtcatcatcagtgtcttcccttatcactatgtagactctcctgggttggtcttctccaccaaaggggacttcagtgaccaccaggaggaaggaccctccacacctctcgccctgagccccaccgctgtcctggtctgcacacccctcgacccgactgcacatatccaggcacctccggctccacctgcccacgccggatcctcccctgcgatcatttcctctgtgcaagggggaatcacagagctggagtcaaccttcccgtccctcaccctccttgccacacacagttgtcagggtttttttctgtttgaaatttgtctttggtctgccccaggcctttgtcccagttcccatcgacttaggtcctggcaccttcatctctcactgtccttttgcctcaccctcaaagctcccctctgccagagagatctgagcatttcatcactggcttaaaaccctccagcctccgccttgctccctcatcctgtgaataaactccaaatcccttcccgggtcacactggcctctccatgccccagccgcagcttacctcgctggccctatctcacccccacgatgttccctccagccttatgctgggattacaggagtggccactgtgcctggccaacaaggctaattttgaaacttttgtagaggcagggtctcactatgttgcccaggctggtctcaaactcctggactcaagtgatccacccacctcggcctcccaaagtgctgttattataggcataagccacccagtcacgtgttttataacaggtgttttatatatataacagccagccaggtattattattactcgtcttaaagaatgatctgctaggtttggtgatggcctataaaggcaggaattcactgattcagcattttggacatttacaatgtgccaggcatggctccaggcactgaaatacaccaggggacaaaatgaagtccccaccctcatgcaccatagagtgcaaacaggggagtgtccagacacaaacaaggggcctagggcagtggtgcatgcctataattccagcactttgggaggcccaggcaggaggatcattggaggccaaggagttcaacaccagcctgggcaacataacaagaccccatttctacaaaatatgaaaaatgagctgggcatggtggtgtgcacctgtagccccagctgctcgggaggctgaggtgggaggattgcttcagcctaggagttggaggctgcagtgagccatgatcacaccactgcactccagcctgggcaacagagtgagacgctgtctccaaaaagaaagaaaaaaaagaaaggagagagggagagggagaggaagagggaagagggaagagggaaggagaaggaagaaaagaaaaaggaacaaaccagaactgcaaataaaaaaacaggaaggggtgagcacgtgacaccagggagctcccatcctgttcgtgtggcttcaatccccggcacctgggttgagctgcagctcaaacgctaaggaatgaatgcgccagggcacagctgcagggaaatcgaggatagctggatccttttggtgccaggtgatggcaccagagagcacaggatctggtccccgcgggcctctccagccgcccctgcaccctcactccccaccttcatgcggctgtagacggtggagacgggcgtgaccgggtggtgttggtgggagcccagcagaccgcagaggccacagatgagctcctggtccttctcgcagaaaaggctgagcgggttccggtggtgcacgcagaccttgggctcygggtccccagggagcctcagggcttckatcaccctggccagggagacgttgggcarggagctgctgccgtccaccgcctgccggcacayggggcagcgcagctcggcatccaggtggcaggacagggaaaccaggcagcccttgcagtaagagtggccacactgcagcatcaggggctccttgaagacctccaggcwgatgggacactgaagccrgtcctccagctctggcaggctcacctgccaagccatccacactcactgcccgggctgaaacacaggcatccgacctcagtcctgtccmctcccctccccctgtccagcactcatccaccaccctcaaccctaaggagcaccagaattttagaggaaacactttgagtcctggatcccagtcctaacccacatgaccttgggccycagtttccgcagctgtaaaacaaaagactgcagtgaaaaaaactggtcccttgaagatatgtgtgtgtgtgtgtgtgtgtgtgtgtgtgtgtgtgtctacattttttactcaaatttggagacaagcatgaaaggggccatctgcagggtcatttgcagtgacactaataatgcaaggtccagccccagcatgcatccggacctagaactgaacagcaaaacctaggcaagctccccaccttctagatcagttcccaaactttcgggaaactgttgaaagcataggtgtaatagagattctagaggcccaccttcaaaggatcttcttcagggggtctccagtgagacccagaactctacacttataggtgacactcccaggtaattctagagagcctggaacctacaaggcctctaccctgatctcccacctgctcccctatgaaagcttgtcaatgagacagaagcagcaccagcagcccccgggggagcccgacattggaatacctggcttctcacaatccgctgggcctcccactacagcctcaagccagcatcactggctttccttcttcccagcagggaacagcaggcacagagtcagaagtgggaaatgcagctggacgcctgcaccactgcctggtctctgccccttctctcctcccctttcccagcaacacycctgtgtccccaaggtcaccagaatcaggtggaaactgggttacatcacgggactggggaggcagcctttgttgggcctgctctgataacattcaggtgctggccttggccactgtggaggaggggcagaaacagagggactgggtacaccgtccacacctcatgaccccaacaggagcagataggtgctgggaaacagttctttctgaatctcaaactcttgctcttactctcctttttttgggcgggggggctggggggtggggaaagacagcttgttgctctgttgcccaggctggagtgcagtggcgtggtcatagctcactgtagcctccaactcctaggctcaagccatcctcctacctcagctgcctgagtagctgggactacaggtgcatgccaccatgccaagctaatatttaaaaaatttttttagataccgggtcttgctttgttgcccaggctggtcttcaacttctgggctcaagcaatcctcccaccttggcctcccaaagtgctgggattacaggcgtgagccttactgcacccagccttccctctctctctctttttttctaatacaaactggcagatgatgattcaatctctctattttttttcattttattgttttatttattttagtagagacaggggtctcgctttgttgcctgggctggttttgaactcccggcctcaagcaatcctcctacctcagcctcccaaagtgctgggattataggtgtgagccaccaagcctggcctcttttttttttttttttaagatattcaaaggtatccttatttacttagattttttaaatcaaggtataacatatacaagtgtgcaaatcttaaccacacagcttgataaacacttgatgtatatacacccactctcaagaacaagatgtagagtgattccagaaagctccctcctgcctcctcccagtcataactcctaacaaggacagccactgtccttattaccatgttgtcatgtggactgtttttgaatttcacataaacagcatcatatagaatgtactcttttgtgtctggttactttcactcaataatattgaattgtgagttttttttttaatgtgaagtctttcaacgtttagaaattcaatgacactctgttatacaggttttgtttgttttctgagacagagttttgctcttgttacccaggctggagtgcagtggcgcaatctggctcattgcaacctccgcctcccgggttcaagtgattctcctgcctcagcctcccaagtagctggggttacaggcgcctgccaccatgcccggctaattctttgtaattttagtagagatggggtttcatcatgtggggcaggctggtctcaaactcctgacctggagcgatccaccggctttggcctcccaaagtgctgggattacaggtgtgagccaccgcgcctgtcctgttatacagttaatgaatattatggtcataatatactgctgtggtttgaatgtatcctcctaatttcatgtgttggaaacttaacccccaatggggcagtattgaaagttggctgtagcttacgcctataatcccagcactttgggaggccaagactggaggatcacttgaagccaggagttcaagaccagcctagcaacaaagctacaaaccatctttccagcaaattaaaaactaaaaaataaattagctgggcctggtggtgcagttctgtaatcccagctactcgggaggctgaggcaagaggatctcttgagcccagggagtggcggctgcagtgagctgagatccatcactgaactccagcctgggctcagaacgagcctctgtcaatcaatcaatcaatcaatcaatcagtgtcttgtctgggcctaaattctctagaacacaatggaagagagaaagtgaaagaaggtggaagtaacccacagctgggagccctgaaccctgctggtggcaggtggctctcgtgtcctcaccaggttgccctgcaatcacatgctgcatcctttttcctgaacctgccccacgtgccccaccacgcagccactccgagggctccttcaagggcggcagccctgtcactcacgtgttccaaaagtgcttcccctgtgccctgatggcctcgccatgtgtctcatcatgccccacgcgctcccactgtgcgccccacctcgcacccgtgccccatcatgctctgcgtgctcgttaggtgccccatcatttcccgctcgctctcgttacgtacccagcctccggcccctgtaagtgccccatcgtgctctctgtcgctccagttagatgccccatcctgccccgcgagctccaattacgtgccccacctaaccccccaygtccgtgcctcatcatgacccgcacgctatggttacatgccccgcctcgcgctaccgcgcgtgccccatcatgctctgcgcgctcccattacgtgccgccacctcgcgcccctgcacgtacccaacgtgccctgcgtggtcccgttacgtgtcccatcatgtttcgtgcgctcccattacggatcatacctcgcamctcaccgcgtggcctctgtagttccagagctcgcgagggccagggccgttggcggcggttggaacgaaacgatgagtgcctcctcgtggccccagaatgkaatgccgccgtcggtaggggtctgccgggcataaaggggccttcggaaccccaccagagtcacagccaggragggcagcggggcgcaccaggccgaaggctcacgccacagggagggcagctaggacatggggggaagcgcgttaaaccagggagtcctggaaggggacgacgcccccggccaggtgagggcccagacgtttcgggggcgtagacgctgaggggtggccgggtgggtctgcggctctgaggcctggctttcattctccatcagtccctgtacgagcggttaagtcagaggatgctggacatctcgggggaccggggcgtgctgaaggacgtcatccgagaaggagctggagacctagtggcgcctgatgcttcggtgctaggtacgccctggggcggtttgtcckcaggatccatgtcatcgcactctgttgggaagagagaggcctcattttcaaaaagcacttaatggggttggaaatgctttgtttgaagtggatttttgttttttgtttttgaaacggggtcttgctcagttgcccaggctggagtgcagtggtgcgatcatagctcactgcagcctccacctcctgggctcgtgattctcctgcctcagcctcccaaataagggatttacaggcgcgatccaccatgcccggctaatttttaatatttttgtagatatgggggactctatgttgcccaggctggtctcagactcctggacccaagtgagcctcccacctcagcctccccagtagctgggattacaagcatgagccgctgcttccggcctgaattagtttttttaagacgaaagctagggamtcctatgtcccctttgtgtgatgcttccgcaaagctcttgaacctctgagccaaagggycggcacccaaaatgcagagagaagatttattcctgtacctcggggtgtcgggcagcttaagctcatctgttcacattgtttctgtgtgatcatgagagactcgatattatggwggcrtgggtgtttttggtccattttccttacattctttcttctatcctagtgaaatastcgggatacctggaacacatggacagacccttmgattctaattactttaggaaaactcctcggctaatgaaacttggagagggtaggttcagagtgggagctggagaagaaggaattgtttaggggctagatgaggcacgatgcctcaggctgggaagactgctcagagcgcaggttctttgarttggctttgctgaggctgggttttggtaacacagccatgttctctccccttgagacctaggcatttgggagatggcttaacgggcaaggtataatctttgcactctgacttaactaaccactgggaatgtttctttgttcatttattaagtaaaactcaatcgaatacttacttcccacaatacatggtgaaaagagaggatgtactcagaagattagaacatctccacccttaaggacctcacaatgtagtggaggagactgacctgcactcagctcacttggtagaatcggatgagtgcctgggaggtgaaagcagtgttgtgggtgtgcttaatgaaggcatgattaattctagctgggaggttcagggaaggcttcctggaagtgggggcatttgaactgagcctrgaagtttgaataaaatttatatcagtagaagctgggcacaggctcaggaggaagacattgcaggaagagggaactgtgtgagggagacatggaggccagagtactgctgacttagagggggaagaaactgatagcactgagcaggatactgagcaagcttcacccaccttctttgtccvttcttacagatattacactgtggggcatggagctgggccttctgagcatgcrgagaggagagctggccaggtttctgttcaaaccgaactacgcctatggaacrctgggctsccctcccttgatccccccaaacaccactgtcctgttyragattgagctgcttgacttcctggactgtgctgagtcagacaagttttgtgctctctcagctgtaagttccagagcacagatgtcagcactttatagagagacgaatgggttggtgttattggtaattcttctagatggcctgccctgaggctgatcgtcctctccagggtacccccgcggctcctgtgcggtggcggcggagttcctctgcttcctagtctgtgtttgtcttagtaatggctctcatgtgtagataaatgtgctgggcaaggtaaggctgtgagtttaaggattagtggtttgaactgatttttcagtcatcctttgcctagttctccctgtgagacagtgaacacttgcttttcatcgtttggtttccagcaaggcaggcattggtagctcataactagggtgactgaataattgattgtccagcccagcacaggtgagagtaaaaggggctgttcactggaggggttacccatgacatcgggtttaaactgagacagtcccaggcaaactgggatgtatggccactgtcctcaccacttaagtcttgcctcctctttgtagcctttcacttaaccctgtcccgtagatgcagggcttctgaccccgtcagcagtcacaggcactgtctttatcatgctgtctcacactgactccatctgtggccttagaggtccatgccagggtttatatcttcacatggagtctccccagctaaactgtcagcactccaagtgagggagctcaccctttttcatcattctgagattcgagtttcttgcaaatgcctcgtcccacctgtggtgaactcatttaggatctggggggtggggccgggaccagagaggctctatgggtgactctgaagatggccagggcagagcatcatgaccataaagactgccagggccctgagcaaaccaagacctgttcagtgcttggtggccaaatagtggttttgagcactgacttctgtgcttggcaagttccgtcagtttttgattccatgggacactgcttcmtcagagaacatcaggggaagactgaagacgtagacttccttctggctctagggtgtaaaatgggacaggttataacactggtgtggcttctgtcagattcagaggtgactccaacacagaaggctgtaaacagaagtgcatgatctgaaaaagaagagctcacagctgtagtaacacttcctttctttcaattactrtttttttaaatggagacatgttctcactatgttgcccaggctggtctcgaactcctgggctcacgtgtactaacacttccattgtggcattactgcttttggtttccttgctgaatattcctgtctctggtcctcaggagcagcaagaccaatttccacttcagaaggtcctgaaagtggcagctacggaacgggagtttggcaactaccttttccgccagaatcgtttctatgatgccaaagtgagatataaaagggtgagaatgctttgaaagttaagtgtaagtttagatcctgaaaacttccttgtttaaaaaacacagattttgttttgttgtgatttttgttttgttttgtttttgagacaagagtgtcgctctgtcgcccaggctggagtgcagtggcgcaatctcagctcactgcaagctccgcctcctgggttcacgccattctcctgcctcagccttccaagtagctgggactacaggcacccgccacttcacctggctaatttttttgtatttttagtagagacagagtttcaccgtgttagccaggatggtctcaatgtcctgacctcgtgatctgcccacctcggcctcccaaagtgctgggattacaggtgtgagctaccgcgcccggcaaaaaacacagatttttgtctttctccctactttctatgagcagccattaagaaaaatctcatttaaaaaaatcctcatgccaggccaaggcaggtggatcacctgaggtcaggagtttgagaccagcctggccaacatggtgaaaccccgtctctactaaaaatacaaaattagccgggcgtggtggtgggtgcctgtaatcccagctacttgggaggctgaggcaagagaatcacttgaacccaggaggtggaggttgaggttgcagtgagccgagattgtgccgttgcattccagcctgggcaagaaaggcaaaaaaactcccatctcaaaaaaaaaaaaaatcctcatgccaaagggataagtactggagaggggactaacggggggataagggctgaagaggggactctcgaggggataagggctggagagaggactcacgggattgggaggcacctgggaatgttctgtgttttgacgtggttcttgggtacatgggtgtgttcaggttgtgaaaaacatttgcctctgtatatgtacttgaactagaagtgtttagaatttccatctcactgctctaaaacaattcagtttattaacttttaaaaattctcatcccagtgcttattaggtcctccaccaaccgatttctccacccctttgccatcatcatttcatgtctctgacagtggaggctcatttggcgattctagcctgaggcaattgcagcctcatcaagcctcctgttgtgattttgcttcttgtgtaggttatgctgagctgttttctgtttcctttttaattttattcattcaacaaacatggctggacgcagtggctcatgcctgtaatcccagcactttgggaggctgaggcgagtggatagcttgaggtcaggagtttgagaccagcctgggcaacgtggcgaaaccccgtctctactaaaaatacaaaaatgtgctggcatggtggtgggtgcctgtaatcccagctacttgggaggctgaagcaggagaatcacttgaacccaggaggcggaggttgcaatgagccaagatcgcaccactgcactccagcctgggcaacagggcaagattctgtctccaaaaaaaaaacaaaacaaaacaccacacatgcgtgtgctgtctctggaacatactcatataggccaaatgttgccgaccctgtcacccaatatctattcccccttctcctaacagaacctcccatttcactcaaagcatcagtgtactaattaaaaaactacatcttcccagcttcccatgagcttagggtgtccctgtaacaagggtctagccaaggagacataaagggaaacctctggagggtcttccagaaagctcttaacataacacaagcaccagactcttctcccctccctccttcccacccaggtgaccccgcaatgcgtggccaggggagaatctccctggggcccgccacacagctcttgtcctggggctgccctataatgctagtttgtggatttcctgtttttttctcaacttactcctttgttttaacagagtatgttgatgtatgtctaaaatattcttggtttttaaatacatatttgtctagagttgttattaaaaagtcttttggctgggcacggtggctcatgcctgtaatcccagcactttgggaggccgaggcgggtggatcacctgaggtcaggagttcaagaccagcctggcgaacatggtgaaaccccgtctctactaaaaatacaaaaattagctgggcgtgttggtgggtgcccatagtcccagctacttgggaggctgaggcaggataattgcttgaacccgggaggtggaggttgcagtgagccaagatggcataattgcactgcagccaggggaataagagtgaaactccatctcaaaaaaaaaggtcttgctagttctgagctcaaagctaacaacaacaacaaaaaaatcttactactacttaggttctttattcctttctacgtgacctgttttttcttctgtagagacgaagatcgtttttccccggcattcctaaattttacggtgatgtgcctctgcgtgtgtgtatcttttcattcaggaaacttttcctccactctgggaaactttcttgagttatttctttgataatttactcttgttccctctgccctctttgtctggaactcctattatcagacctcctgcactgagcttctggctgctgtccctcccccctccccacctagtttccatcttttctcctgtttgtgtcatgtatggaagctttccttgactttttgccacctcttctgatgaatttttcatttaaaaytggggggccaggcacagtgactcacacctataatcccagcacttcaggagtccaaggtgggaggattgcttgaagccaggagttaaagatcagtctgggcaccatagcaagatcccatctctacaaaaaataaattttagaaaattgaagggctatttgttcttcccctccctagcattctgttcttgtttcatgtgtatattattttatatatttagactgtcgattataatttaatctcattctttttctgtttggtttttctacatattggggactgtgtccttttgcactaagtttgtcaatgacctaaagatggtttatttctcactcatgtaaaaggctagagtagaggcatgcaagctagggccagttggtgactctgctgcagatattttcagatacccagttctcatttctggggtgagactctggccttgtagtccaagatgagggtctctgagttctagcagcagaagggaagaaaggctgaaggcatgtacagctctgttaaggaaggtccttgtcatatgatgcttctactgaattatgttttccagaacctgttctccaggctttgcctagctgcaaagaagcctagcaaatatctaaattctggttgtacgtgttcctggccaaaaaaaaaaaaaaaaaaagtcctattactgtgaaggaagggagggcagctgctgggaggcaggaggccacctctttcacagagggtttcctcaaatggctggtgatctttgaccactaagatttaaaagagacatcacaaagctgattgggagctccaggtgcttggtggggcaggttgcagtgtggtcaaagacagcctgcacacattagagtatgtaggtgtttcctcagggtccattgagtcctcctctttctgccccgtgtgtgtgccaagggaccggcattctgggagccaagctgggcagcaggacagaggttctcactgtctggtattgagattccttttcatagccgcgttaccagtataccaccttcctgctgtctgctccagcctgcccccaagtcaagggcctctttggttccattttcccagaaaggagacctcgtgattgctgaggccatctggacacataggggcagtggacggggtggggaacatttgacctgacctcctttattcagccccaccagatagctctaattcctggttccatcagttcctaggtctctccaggctctgaggggcagaccggtcccttttacattggcaccactctgccaaatcagtcatcacactgccacccaccctgaacctttgggtttattggtccttttcctgtcctttgcttgtgttggagtactacctgtcttagtcccttagggttggagaaagtagggatgtgtgtggagcctgccttgctgagccagaggttttgcacgtcttttcctagtggaaagtttctcagtctttggagcagcggactgacattgtcagcaccactgtgtctccaccttttgctcagcattgtctgggtcacacaagtatggggtttcctgctttcaagggatttgaatctagttagggagttaaatgcagctccaacagctaaccaatacctatggtctgaatgtttgtgtctycccaaaatgtgtatgttgaaacctaatcatccatgtgataytaagaggtgaggcctctgggagatgatgaggtcatgaagatgaaaccctcttacatggagttagtggccttataaaagaggtccctgagagctgtcttgtcctttccaccataaattctcggcaggaaaaaagatgaacaaagtgatcagaacctattcaggccacagttggtagattcctagtcrgaaacataggttacatctaaggaatcataggtgataggaggcggccagattcaggaagacattcaaatatgtgtggatggatttggacttgatgaagtggatggcagggaaccactgaggaagagtgtgttgataaaagtcatattcggggaagaggcagtagttgtgctggagctcgtgaaaactcaaaatttcaattgtaaaattttcaggagttttgtgccctcgttaatgtcactttggtagtttgaaatcagctctgggaggaatatttacagcatrggaataggcaaatgctacaaacaggggtccacctcccccgagagctggctattaaacatgtaccagcacaccactgtgtgcaggacatgtcaaatgacaaacttcattttaatgaggctctgtttcatgttaggcaccgtgctgggtgtgctgcggctgaacctgttaacagggtccaggaatgtgttaaagcagctgtgagttgtgcaaatagaagaaaaagctctggaagtacttccacaaaatggatggttagacttgatgacgttgtatatgatgaagttgtatatataagagatcaaggaaacagaagaagggaatgacttgaaacttcctggtctgagaaaaaaatttaaaccaaggaataactgggaaagaaatgtgttactttcaattttgattactcatgggaatgagcaggtaagcagggcctgtagaaaactgtttccagctgacaacttgcttcacaatttcatttgggtatgagagcagggttcaggcgtgaggttccagctggtgatgtgaatgggagctgaatccattcagaaggtatggagacagttgatgggaacttgcctggtgaatgcccagagtttagagatggaagggaggaccaaggaaggctcatgactttctgcctgtgctgccatctcctgacacattttctccagttcttccatgtkcttttttttttttttttttttttgagacagagtctcactctatcacccaggctggagtgtactggcgccatctcggcctcactacaacctccgcctcccaggttcaagggattctcctgcctcarcctcccaagtagctgagattacaagcgcctgctaccacatccagctcattttttgtatttttagtagaggtggggtttccatgttggccaggctgatcttgaactcctgacctcaggtgatccgcccgcctcggtctcccaaagtgctgggattccaggtgtgagccatcgtgtccggccttccagttcttccattctacttgcaccttccaaatggagttccagggagtgcaggctctgccttcatccatttttttttgttttactattttttttcttgttgttgagatatgattcacataccataaaatgtgtgcttttaaagtgtccaattcagtggtttttagtatattcacaaagttgtgcagccattgccactatctaattccagaacattttcctcaccccgaaatgaaactcacaattctttggcctcagatagcctctgttctcctttgtttctatggatttgcctattcaggacatattttgtaactagaattgtcaaatatgtgtcattttgtggctgtcttatttcacttagcatgtttttgaggtttatccatgttgtagcttgtacaaacctcattctttttttgttttttgttttttatgagacagagtcyctgttgcccaggctggagtgcagtggcacgatctcggctcactgcaacctctgcctcccaggttcaagcgattctcctgcctcagcctcccaagtagctgggattacaggcacctgccaccacacctggctaatttttgtatttttagtagagacagggtgtcaccatgttggccaggctggtcttgaacttctgacctcagatgatccgcccacctcagcctcccaaagtgctgggattacaggcatgagccaccgcacccggaccctcgttcttttgtaaggctacttttccgttggatggctctgctgctttttgtccattcatcagttggacatgtgggttgtttccacttcgtgattattatgactgatgcagtgagcgtttatgtacaagttmtcgtgtgaacacgttttcagttttcttgggtatgtgcctaggagtgcaattgctggattgtgtgggaactgtcaaaatttttgaggaactgccaaactgcttcctacagcagctgtaccatcttacattcccacgagtaatgtgcgaagcttccaatttctccacatcttcaccaacacttattttatatttttaaagttaggcatcttagcggatgtgaagtggtatctcactgtggttttgatttgcatttccctgatgactgatgacattggacatattttcatgcatttaatgactatttgtctatcttctttggaaaaatgtctattcggagtctatgcatatctgaaagttgggtcatctgtctttgtactgaggagtaaatgttgctgctgtgctctggatactacaccctcaacaaacacaggatgcgcaaatgctctatgctgttctgtgggctgtctgcactttctttgcagtgtccattgaaacacaaaagttttacattttgatgaagtctaattctttgcttatttgtgcttttggtgttatatctaagaaaccattttctaatccagggtcacaaaaatttacacctatttgtacttctaaagtctgatagttttttaaaaaaatatatgaaatgctttatgaatttgcatgtcatctttgcacaggggccatgcgatcttctccctgtctttccaatttttagtatatgtgctgccgaagccagcgcagagtcttagagttttaactcctacttttagggctatgctccactttagttaatttttgcatctagtgcaaggtaaacattcttttgcatgttgatagtctctcgtcccagcattatttgttgaaaagacagttctctcccattgaatggtctggacacccttattgaaaatcagttgactgtagatatataaatctatttctggactctgtgttcaatttcattgatctacatgtctgtccttatgccggtgctacactggcgtaattactgtagctttaggaagtttcgtgttttttgtttattttttgtcttttagtaagttttgaaatgggaaatatgagttctccagctttgtcctttctcaagagtattttggctattcagggtcctttgaatttccatgtgactctttttttttttttttttttgaggtggagtcttgcactgtcacctaggctggagtgcagtggtgtggtctcggttcaccacaacctccgcctcccatgttcaagtgattctcctgcctcagcctccaatgtagctggaattacaggcacctgccaccacacccagctgayttcgtatttttagtagagatggggtttcaccatgttggccagacgggtctcgaactcccgacctcaggtgatctgcccgcctcagcctcccaaagtgctgggattacaggcatgagccactgtgcctggccaccatatgaattatctaatcaacttgtctgtgtctacaaaaaaggctgttgaaattttggtagggttgcatgaatatgttgaccagttaggaaaatattaccatcttaatattgtcttccaattaatgaacatgagatatttttccattttatttgaatcatctttaatttctttcaacaacattttgtagttttcagtgtgcaagtctttcagttgttttaagtttattgctacttactgtattctttttgatgctattgtaaatggagttgttttcttaatttcatttttgggtagttcgttgctagagcatagaaatawacctgacttttggccgggcatggtggctcacgcctgtaatcccaacactttgggaggctgaggcaggtggatcacgaggtcaggagatcgagaccatcctggccaaaatggtcatattaaaatatgaaaaaattagccgggcatggtggtgcacacctgtagtcccagctactcagaaggcggaggttgcagtgagctgagatcactccagcctggcgacagaacaagactccgtctgaaaaaagaagaaaaaagaaatatacctgacttcttatgttgatcttgtgtcttgcaacctgtaacagccgatttttagctctgatagtttttgcgtgtggattctttagggttttgtacataagactgttactcctcttgaccatctgccttccctctccacaggccctrttgcttctgcgccggcgatcagcaccccctgaagagcagcacctggtggaggccgccaagcttcctgttctcctgaacctgtcctttacatacctgaagctagaccgacccaccatagccctgtgctatggagagcaggctttgatcattgaccaaaagaatgccaaggccctcttcaggtgtggacaggtgagttggaagccagtgacttgggaataaacacccaggaaaaggtagtagcagtgctcaactcagctactgcaaaaatgctgkctttttttttttttttttttttttagacagagttttgctcttgttgcccaggatggagtgcagtggygcaaattcggctcgctgcaacctccgcttcctggcttcaagcaattttcctgcctcagcctctcaagtagctgggattacaggcatgcgccatcacacccagctaatttttgtagttttagtagagatagggttttgccgtgttggccaggctggtctggaatccctgacctcagttgatccgcccgccttggcctcccaaagtgctgggattacaggcatgagccaccgtgcccagccaaatgatatcttttctaactgtgcttttaaagttctctccttgggacaggcttgtcttctcctgactgagtatcaaaaggcccgggattttctagttcgagcccagaaggagcaacccttcaatcatgacatcaataatgagctgaagaaactggctaggtgagctgtgtttgcaggagcatgaagagagatgggtggggttgtgactctggtctgtccccccaccccccccaacaaaggacagtctggcggtgttgcccagagtgttaggaggccgccccctctacagctgggtttytgaagtgctcggccgtgcgctgcaccagcagttcccagcaagcaggtgagacagactgccagactatacatctccatcatcgcccacctttctgtttcccctaccgcaaataaacaacccctagagaggtgggagggtgtcactttttttttttttttttgagatggagtccctctctgtcacctaggctatagggcaatggcatgatctcggctcactgcaacctccgcgtcccgagttcagacgattctcctgtctcagcctccaagktagctgggattacaggcgtgtaccaccacatctggctaattgtttttgtattttagttgagacagggtttcaccgtgttgaccaggctggtctcaaactcctgacctcaggtgatccccccacctcgtccttccaaagtgctgggattacaggcacaagccaccacaactggccccggtgtcacttaaaaagagtcttctggtgcgctcttccctgcgtgctccaccaagaaccactgctcctaaccaagtgcagaaaggcccctcgtaggtcctcatgtgaccagaaacaggcgtttcgggtctgactcatacccatggattgacctccttgttacccacgtgactaagcacaccagtcttttagtgatgtaattttttctcattatagaagttttgtgtccattgtagaaaaccttgaaaatgtctacctataaataggagtcccccataactccatcacttggtaataggtccatggtttttaaggtatatcttcttctgtaatggtgaaattctctacttgtcttaatattaaacattcrgtccagattgctagttaaagcttgcttggcattagtgtctgagatgtgagtatctcttaggttacatttcaagccttttaggacttgccagcaatttcctttctggtatttaaaagtatcctgtcagatctggtcattctttagtgagaaaatcaggagaggttagaggctgctgagggtgaggggtcgtttggcgagactcagcccggagcctggtggccagaggcacctgcccttcaaggcagctgtcctttccagttagggggttttgtccaggggcttggctccttggccagctgtgggagccttccctgcctccccacctctccagcttacttccatccctcccaactcagtttgagtcctgataaattttcagtgtttctggatgtgagtggagaattccagccaccagatgtcacctcctccaaacacagacctcctctaacragtgtgtatttccctctscagctrttacagggactatgtggataaagagaaagaaatgtggcaccgcatgttcgcgccctgtggcgatggttctacagcaggagaaagttgaaggtaatcaaagggccagggtggcacacaggcttccggatggagaagcgtgctgctctcctccacccccaagtgaatggtggctgtctgcagctgagggtggacgaggggtagacaagttccttgctgtaaagaacaacacaacggtagtgcaggatgcacgtgctgcacgcctacctttcccgtgagaagaaagttcgcccagacctgtgggttaaatgtataggttcagggggccttgagctatttatttatttatttgtttgtttgtttgtttgaggcagagtctcactctgttgcccaggctggagtgcagtggtgcgatctcagctcactgcaagctccgcctcccaggttcaagcgattcttctgcctcagcctcctgagtagccgagattacagctgtgagccgtggcgctcagcctaaatttattttttaaaaaacctttttttttcatgttttatgtgaaactctccttgcagttgcttggaacatgagactgagtagagtcatgaatgtgatggttgatagagctgggctttgacgtgtcaagcttctgttcatcttctttctcctgagaactcgaaagcctccaacttgactgtgtctctaacacattactaaagcagacaagatcgcagggtggggatgggctgtggctcttaaattctactttctattagacttagagatttgaagatgctgaaagcaacagggagcggaatatagcattcctcccaagatcacacctagtaattttgcaggcacagggcgggagttcccaagcacatgagataaccctccagtctgaaccctccagtctggtctactatttaataaaattaatggaaacaaaatcacctgcctgaaacacctgcttagctgcacagataactctgctctctcggagaagtcaaacaaggaacaacaagaaaacagctgctgaacgggctcatggtgataaatctctcctttgttgcttcctccatctccctacaaaaggggcttgagaggaggaggcagtgaaaaggcctattcatccccgacattttcatagcggtccataaactgctgctatctgcactttcagatgcgcccaccagcatcacaggtaaatgttgccttygtcactgatgctggccatgtgaaccctggccttcaggtctttcagtggcctttggagtacatatttgcaggtcttcagaactgagatgtgagccagaggacttcccttgtttggtcacttctagtatccagtaaaaatgaagggcagtgactgtttgccaaacattttggactgtgaccccacaagtcctgtcatgaatgaagacccaggtctgccagggtccatcccagacaagggcttgggcagcccagctgggcagcagttttcctcgccatcatgtttgcttcccagccttttcagtctgtaggactggaggctgctgatcttcagatgctttcccccagatttccaactccagcatttatcttaccatcagcaatgactgtatttgtgttctaaagtagccaccactgtcatattgccactgctgtcacagttgtgataagttttagcttttgtgtctttgctctccctgctcccctttttttctgtagtatttgaggcctagtcatttaaaagaagctaaaaatccagtcatcttgacaacctagttgtcactaaccaggacaattttttttttttaagggtctccctctgtcacccaggctggagtgcaatggcacaatcttggctcactgcagcctctgcctcccagattcaagtgatcctcctgcctcagcctcccgagtagctgggactgcaggtgtgagccaccacgcctggctaatttttgtatttttagtagagacagggtttcaccatattggtcaggctggtctcaaactcctgacctcaggtggtcctcccgccttggcctcccaaagtgctgggattacaggcctgagccactgcacctggcttaggacaattttaacttttgttcttttcatcttagatgttagataccactgacttgtaagattacttctggaggaatgagtgttctcttaagtattagttatgtgctctaagcctctgactatagtagacagtatgccttttccatctttgcattttctagcttctggagccatgccaggtgcacgattggtgctcaggaaatgttggttggactaagtgtgaaatagccraagcaacagaccagcctctaataaaacatcctccaggctggctctgggattggctgttggacccttggtattgccagggacagaaacctatctttagcatcagccagaaaaaaaaaaaaaaaaaaaaagatttgcagaaggggtcctgggagtggctcacagagttgaggaggagtttggcagtccttgggcagacagtgaccaggcagctctgagggccttagggactcagtctcccctcggctttgttttctccccctgtagggagtgcccatacatccctttctgcaacctcctccctaatggagtgagagttctgtaccctaaaagtccctcctcttcctgccccaaacataactcttcagtttgaaagatcctgggcaggactccggcctggttgggggtatgtagaaccccatgaatgggagtttgtgttttgtccttcctatcctgacatgctggtatctgaggcccttgtgatcattttactgtgtctggaaaggagctgtgaagggagctctatagctattttcaggcatttaaatggttaacatacaacaggtgaaatttgttctgtggtttccaaaggtcagcaccagtaagctgacacaataggaagacagaatctgacctgataggagatttaccagtcaaatgtcctgccatgagttctcccaccatggagtacacagtggaaggggccacttttgactgcttttggggaaacatctgttcccgggccactccactttgttccacggggctgtggggcatctcgggagctggtgcagtccctgttagggtctatccgagcagagctggagggcctgagaggtggttaaagggagaaattagatcaccttcctggtcgtttttaccatcaggtaattgcagaccttcaaggcagaggtagcagctcccatccccaaggcacacagcagagatgaaatatgacatcctatacttagcatcaaaaaacaccacccgaggaaaggaagtagcaggaggggcctcgttcaagagcagacagattttgttgcctgctgttcccaaacataccaaatgcaaggaatggctgccagaggaaagtgttccgaaygggggaaagccatgcctgccctgccccgcgtggcccgccttcacactgtctcctgccatccctgtggggagccgactgttggtgggcactctagatgctatgtggcatatagagagagttccagtaccacttctgcagccctgacctgcagggattgggggtctaaacagggacaacaagataagtccattaaatcacagtgttcaagagtgggctgtgagggagcacccctgatcagaaagaggctttgctgagctaggcctggggcatgggcccaaggggccccaggagggagttgtgagaggtcctgatattgtcctttcatttggggcctccttggaatgtgggtggcattctatagggcattatagaggaggagaagacctggccagagctgagctgctctgaggggctaaaggggcagcgtggggacacatttaaagtggcaggaccatcaggtggcaggtgtctgagtaagaggtgatggcagcctggacgtgaacctactggcaagagcggaagggtggcaggagtatgcggcctcccatctggaactgacaggagggtattctctgtgaagagttctcctgacaaaccagaccttacctgagggagcatgaccatagtgcctgaggggctgaagatgccctaaccgaagttactgattgtggaggagggcagctttagtgacatgtcagccatctgctaacagaggtgggtgggcagaggccagaaccaggagtccagggctggtccccatgtaccaggagtgactgggaaaactccatgaggggcggccagaacttgagggagtcttgggttacctggcaggaccaggggtgcagggcgaggtgaccacccacacggtcagcttacctacgcgtggctttcattcttttgctcttggtttatcataacatttttcttctaggttgttttgctagtattgcctagcatttatactkttttcttagtgtatttttattaattttggtcaaaatttttattcatattttaaatgccaggtattcttctacatgtttcacatgtgttaatatttttaatgtaagatctgcataatgtagatatgatccccattttacagttgatgaattagatgtgaagaagctatgtaattgccaaggttgcagagctcctaagtgatagagccagagtcaaacgctgcatatacacagggaacccgaaytgaatttcagtttcttctggagagtcttccacagggctcaatactatgtttctattaccacttcttgatttatgttttggatatttatctgttgacttcctgctataatataactctttcttctcttacattactacttgtagatcctctgttagattattataacaaaaataattcaatactgatgttcttggcttcatacagctaaagacagtatttcttgtgctccactttgtttttagagacagagtctcgctctgtcacccaggctggggtgcagtggcatgatcatagctcactgcagcctcaacttcccaggctctagcaattctccctccccagcctcctgagcagctgggaccacaggcatgtgccaccacgtccagctaatttttttattttttgttgcgacagggtctcaccatgttgcccaggctggtctggaactcctgggctcaagtgatcctccctccttggccttccagagtgctgaaattatgagcgtgagcacagcacccagccatatctgtttattcttgattcatctaaaattacacagtagcatgtccaggtactccctgttgctcaagtcctttagataggtcccttacttctagaggcttaagcttttaagagccgagaaattcctctatactatttcttaaatcacgtcttcctcgttattccctgtcatcttgttatgggacacctattgactggaagttggacctccttctattctgtctccttaaaatcttttttttctcccttgtgaaatgttcttaattttccaactcttccatcttcatttcatcaatcaaatatttgaatctaagagctcttctcagatttgtctttttcataatgccacacctttcccccccttctttgaaaaatctcaaagttacataacgaataatactaagattccccgatgtgctcaacgtctggctttaacaattaccaaggtaaagccaaggtttccttctaggcttccgtccacatcctccctgtatagcagggaagcctatttccttctatactctccttcgcaacactcaggacttccagaacatttcacttctgacaccagacatgtagggattttccccacaccaaccaattctgaaagcagctcagtgtcctacattacagctctgacacttgacctggacttagtgcatactccacaggttaagggctcatttccacaagactgaccccatttcagactccagtgacaattccaggttgtccctgtgcttcttactaactggttatacatcagaggttcccatacctgttcctttgggttgagtcatctggaatggtgctcagaactcagaaacacctacttatagtcactagtttattacagaggtttttaaaaggatacaaatgggccagacatggtggctgaggcctgtaatcccagcatttcgggaggccaaggtgggcagatcgcttgaggtcaggagttaaagaccagcctgggcaacatggtgaaactccttctctaccaaaaatgccaaaattacctggatgtggtggtgtgtgcccgtggtcccagctacttgggaggctaaggcaggaggattgctggagcctgaaaagtcaaggctgcagtgaacccagatcacgccactgcactccagtctgggtgacagagtgagaccctgtcccaaaaaaaaaaatttaaaaagggtggccaggtagggtggctcacgcctgtaatcccagcactttgggaggctgaggcaggtagatcacctgaggtcaggagttcgagaccagcctgaccaatgtggagaaaccccgtctctactaaaaatgcaaaattagccaggcgtggtggcacatgcctgtaatcccagctacttgggaggctgaggtaggagaatcgcttgaacccaggaggtggaggttgcggtaagctgcacaccactgcgctccagcctgggcaacaagaacgaaactccatctcaaaaaataaataaaaaggccaggtgcagtggctcacgcctgtaatcccagcactttgggaggccgaggcaggcggatcacgaggtcagaagatcgagaccatcctggccaacatggtgaaaccccgtctctactaaaatacaaaaaaaaaaaaaaaaaaaaatacaggcgtggtggcgcacatctgtagtcccagctacttgggaggctgaggcaggagaatctcttgaacccaggaggcagaagttgcagtgaggtcagattgcaccactgcactccagcctggcaacagagcaagactccgtctcaaaaaaaaaaaaaaaaaaaaaaaaagatgaagagccacatggggtggcgcacagggcatggtgtgagggaagggatgcgccagcacccacacgtgttcagcagcctggaagctctccaaaccctgttctttctggcacaattggttgaatggttggccattggtgattgccagttgaaggttgcttcggcccttcccttgtcccatggttggttccctggcaaccagcccccattctgaggctgtccgagaatccccagccaccagtcatgtcattagcatacaaagaaacacccatcatttcagagattctgggggttttaggaactgtgtgtcaggaaatggatagagaccaaatatatatttctgactatgtcacagtccaccccctgctgtccggccacagaccccttaatagcaaaacgatgtgcagcttaagaggtactggcatattactagaatcccatgtagccatgaataaagagtccagtccatcgtcatgtgggcccagagtggaagtgtcatcccctgtctttagtgctttatcatgtctgtaaacccacttaactttcctgacattcttgtgaggaagaatgattgtttctgcctcagattggggaaggagtaaagcttagagaaccaggaccctttccctgaggaggcctctgtgtgtataaacaactgagtgttttcattggatttgaaatgttaagccccagatgatgcctgaagcctcaaacatattcagctgctgtattcaggtggtgcgtgaccccgaagcggccatgcacttttatccttctctcagatgttgaggaaaytcccccctcctttgctttttccgttgaagagaagctgaagcctttgggctgtagagtattgagccctgctacttggccagccttggggaaagaggatcttaacagactaaaaacaatgttttctggaaagtcaggaggcccaagtggaagtaaaggcaaggttgtggagagtactctctggttggtcgagattctgggatttggtcctggctcagagctggcctgaggtgagccccggagcagcgggccctcagcccagtgccaaygccgaggccacaggaggcctctggggccaggggttccctggttccaaaatagctttcctgtgacccggctgtcctgctcagttgccaggaaaccccgggagcagatcatcatctctctcggtatgtgactggatctaggcagggaatctgtttgatccccttcttcccaaagagattaagaaatatctagtggtgagtctctcaaagttacttcgtgcatccagtgagacactgctgagtcctgaataaagacttgtttaaatatatttttgtaattatttttttttccttaatttttttagatggagtcttgctctgtcacccaggctggagtacagtggcgcgatctcagctcactgcaacgttcgccacagacatgcgctaccactcccagctaaattttgtagttttggtagagacggggtttcaccatgttggccaggctggtctcgaactcctaacctcaagtgattcatccgcctcagcctcccaacgtgctgggattacaggcgtgagccaccgcacctggcaatttttgtaattaatttttctgactttccttccctatgcctctacttttttttttcccctcctctaaatggcgttgcatcttctgccgggcatctgggccaggaaggcattctcttattgtcagatgaaggccatgccctgttccaggcaaactgtgtgacctgggctcttaatcttccacgtacctgtgaagtgccttttctcccagctctggaggtgtccctgaagtcatccctttgttgtgtggctataaatacctcaacttcggtggctgccttttcatcataccccttcctgggaaggcatttcctctggaagggttgctttggcccttcattccctctccacatcctctcttggcagccgtaataggcctcaaccctgcttcctgctaagatttactgttgtggattctgtgttctttgcggatgaggtacgaatgacagctactaagttcaatcctggagataactgggttccttttgctgatcgtccacaatcatggaagtgccctttatgattcatgatggggttgaaagacagaacatttggatcctcagtttcatctcttgctatgacattagccaagtcatttcacctctctgggccttggttgcattgtctgcagggtgaagctgaatcacttttttattttaaaagagaaacaaggtctcctatgttactcaggctagagtgcagtggtgcagttatagctcactgcagcctcctgggctcaggcagtcctcctgcctcagcttcttgagtagctgggactacaagtgtgtgccagcatgccctgctgattttttttattttgtaagatggggtctcattatatttcctaggctgatctcgatctcctggcctcaagygatcctcctgcctcggcctcccagagtgctgggattataggcatgagccaccgcgcccagccatggagcagtcacatctttaagatcactgtggagttgtttatgcttcatgaagaccgtcagatatcggcttagtctgtttttaatttcttgcgttcattaggtgcataagccctgcctccaagcatacataatcccaaacaccaacctggataattaagtgtacaggtagtgagtgaaagaagtgagcctaagcaataaggaattgacatcaagccagtgccttgtaccttctagggagagcatgagtccccgccagctttgctggctgacccccattctgcaggtgctgatcctgttctcaagacctttggttgtagctgttattgactgtcatacttttgatgctcccctacgctcccaagcagccaccgacccagggtgaagctgagatgaactggggtgagcctcagaggttcaagaatccagagaagggttttcaaatctaatagataagtgaagagctatgagcaaaagttctctctagctcagaggtcactcagacattcacaaggtgagaaggatgtggtctgccgtcactgtgagggcacccacagcagtcattgtcagcatcagtccaaacagaaaaggcagcaagaggcagacagaggggcatctccaggatgtttggcatcctgaggtcatacagcttcatttttttggtgagctgaatatcatggccatgaatgcgagcaaatctgcactaacttccttttgcttctccaagaaatggcctagagaggctgcctgcatttcttggctagtggccccttcctcttcttcaaagacagcggcatgatatcttccaatatttctccctctctccctttctgtctctccctctctctcaccctctctgtgaatctctcattcagcccctctctcccctctgcttctgtcattttgtctcctcctttttctgaccctcctgcctcccttttacgaggatctgattacattgggctgaccaagataatcgcccagctcaagatccttcatttaaccacagaatcccttctgccatgtatggtaatgtattcgtgggttccgggaattggaacaaggatatcttggggggcattttcccatctctcatactctgttacagatcagcatctgtgagggactacacatcttgccaatgcagagataactcagcactctgcatcctcagcattctyggcttaatcctttccgtcccagatgagatcatcctgacagccgtctttcagaacatttcctttctcgtgctcccttctggtggctggggcctgatggacacagctcacctcatctttctgctgtttgtttactgcacttgagggttgctgtactgtttacattgttaacaaatgctaggtttgctacaaccccacatcaagcaagtccgttggtgccatttttccaacagcatgtgctgaatttatttctctgatttacattttggtaattatcacagtatttctttttttcttcttttttttttttttgaggcaaagtctcgctctattgcccagcctggagcacagtggcacgacctcagctcactgcaacctctgcttcccaggttcaagcaattcttctgcctcagcctccccagtagctgggattacaggcgtgcgccaccacgcccggcttatttttgttatttttagtagagacgaggttttaccatgtaggccaggctggtctcagactcctggcctaaagtgatcctcctgccttggcctccctaaaccttgtttttaaacaagcgtggcagtttggatggcactttgacccttctttgaccatgtatcacagcacagtggcagctggtggtggtgagctgcagttgttggaggaagtgcagcagagccatgctgtgaggcctggcccacccccaaaaccgggaggtacctgcaggcgctctcattccatgtcagcctggaaagggtgggctccagaccactcagctccatgcgcattctcatgggactaggtggccagttgtgacagtggggaagtaatcgcactccctgcagagggacgtggccaagggaggagcagagagctgggctggtggagcacgagggtggctgcaggaagtgcagcagtcagcatggagtggccgccagagagccagggccacaggttgggtggggagaagcaggtcagggagtccctgcaatgagggttggctctgagaagccgcctggcaggagtggaaggggcaggtggaggacccagcaggccggaggactgccgccttgcgggctggccagagtgtcacagcagagtcccaaggggtgaggactcctcaaaaaattttccccctcagttgatatttttggagatatccagattaggttcttaagattggctgagtaatgcattttgggaaggggaaccagttgaatggtttcaggaaggtctttcattctccacgtttactatgtacagccttggttcatctgctgggattttgaagaggcagccataactttgatcagtgtttttgaagggctgagtgacccatgcagggttccagggtcttctcaccagatgatgttcatggctgagtttactctagttccccgttgcagggtacagggaagtgcttgaggctggggctgcgaggcagggctggcacacgacacccaccgccaccgtgggaacggcacctgctgagccttgatcctcagctctttgtcctccgatttccgacagaaacatcctgggctctacagcctccagcccgtggctccgcgattacatcactcctctgtcttctctgttacatttcacacccttctttgattactgcttattatgttgtgcgattatggtggacaccactggcattgctgcttgggtttctagttcacagtccctgtgccttttccgaggcctggggcccacccgccgtggaagcagcctggttcgtaggaatggattcagctggagtcggctgtggacctttgtctgtgttcgctgcctcagcctgactgccattgtctttgtcgatctccggacttatttctccttgagccacggatacagcttttttctgactttgcacctctgtgcgatacatgtattgggttttcaaaatgaaatgtgagctgagctttcctatgttggcgcattctcgtttatgctaaagtgttactttttattggctccgatttgaaaattcaactacctgaacctcgtgggatcccttcgtctgtagggagcttgaagttgatctccccccatctgcattcatgcctggagaatattgattttagggcttattcctaaagtcatttcatgggacacaccctagatcaaaactttcttttttcacttgattattattaaacttgtcattatggacattttcaaacgtctccaaaggtaaaaaaaaaaaaatgataacatgatcactacccatgtatcattacccaggcttgacagtgaacatctttctgctgttcctgtacccactctccaattttttggtagtacttaattttgaattataaaaatgccacatgccagccgggtgcgatggctcacacctgtaatcccagtactttgggaggccgaagcaggcagatcacgaggtcaggagatcgagaccatcctggctaacacagtgaaactccgtctctactaaaaatacaaaaaattagctgagtgtggtagcgggcgcctgtggtcccagcttctcgggaggctgaggcaaggaagtggcttgaacccgggaggcggagcttgcagacagcagagatcgtgccactgcactccagcctgggcgacagagcaagactctgtctcaaaaaaaaaaaaaaaaaaaaaaaaaagtgagtgtatatgtaacttgtccacaaaaagaattatacattttgtactagaatatatttttattgcattttgagtgttttctaagttaacacaaagagaactacgtcgtttttaagaagtggctggatagcattccatcctgtcaggatatggaaatggttttcacagtgattagtaggcaggtaggtaggtagagattagatagacacacagaaacatggtcatggagctatcctcacgcctgactttcctgtgacagtcaaagtcctatcactggttgtgatgggtgtgtctttgcctgaactaggtcatgctaaactgacctctccagtggctgtaccagtttgttcttggtagtgtctgagagattccattccgtcgctttgccatcatttggattgctagactttttaatatttgccaggttggtgtatctcaaataggatctcattactagcattagcagttccctgaccaggtctctgttcacatgtttccagactgaggtggcctttctgtaaattgcctaattgtttctctataaccaaacacctttctgatgtttttaagttatttttgataactctgtcattaattctgtgagttctatcagcagtttcactgcatgcatcaggtatgtgataccatatgccggtaatggtcattttgtcttctcctcttgtatcttttttgtttcccctcacaagacagagtttcactcttgtcacccaggctggagtacagtggcgwgatctcggctcactgcaacctctgcctcctgggttcaagcgattctcctgcctcagcctcccgagtagctgggaytacaggtgcctgccaccacgcccagctaatttttgtatttttagtagaaacgaggtttcacyatgttggccaggctgrttttgaactcctgacctcargtgatcccccccagcttggcctcccaaagtgctgggattacaggcatgagccactgtgcctggccctcctctcatgtcttattcagagcctgatggtgcggtgcatgcttccagaacagtagcgatgggtgtgcctcatgaccgtaatggagctgctgctcgctccaccgttaaacaccatgctgactttggctgagctgtatttttttcttatcatgttatggaaatgtttgtttgtttttgtttggtttggtttttttttttttttttttttttgagacggagtctcactctgtcactcaggcgatcttggctcactgcaacctctgcctcccgggtataagcaattctccttgccttagtctcccaagtagctgggattacaggcaccagccaccacgcctggctaatttttgtatttttagtagagatggggtttaatcatgttggctaggctggtctcgaactactgatgtcaagtgatccgcccgcctcagcctcccaaactgctttgattacaggtgtgagccaatgcgcctggccaccacctcagtctttacttacttctgtcccgttgcctgtggttctggaagtctgactggaaaggggtctgttcctgacaccccacctcctcttccctctctcaggtgctggctcctttggttgtattggggtagggaggaaagagaagggaaagggtagctcacgcctgtaatcccagcactttgagaggccgaggcaggcagatcacttgaggtcaggaattcgagaccagcctggccaacatgacgaaatcctgtctctactaaaaatgcaaaaaaaagtatccaggcgtggtggtgcgtgcctgtaatcccagctactcaggaggctgaagcaggagaatcacttgaacccgggaggcagaggttgcagtgagcagagcctgtgctactgcactccagctgggtgacagagtaaggctctgtctcaaaaaaaaaaaaaaaagtttcccagagcccatctagtagggccacacggtgatggcatctgtctcttggctcctgtgtggtcaccggccatgcccttccctgacctcagctgctagccctcagcacatgtgactgtgacgtcgtgtggcagctgctgagtcctgagatgtttttaatggctgtttgattcccaggttcttcacctaccaacgaggggagagagctgtggttctccatcattgggggagyggaagggagctcccagcgcagccgtggcagccaccttccaggagcaggggctggaatgtcctgtggccgcatctctcatggacgcggctgaaacgtgttttcacaggtgctgttttctgttttccgtgttcgtaacagaagggaggggaaagcgcagctactgacaagtagaacactgctactttttttaaggcagtttcttgtttttttagacggaattagtccttggcttccctcccagtcccagccctgcttccggctgcgaatgtccctgagtcaacaccaatagagattgctttgtgtattttgtagggttctctgttttgaagacagaattatgttacaaatgtttttgttgtaaataaataaaacacttccttgtccttgcaagatccagtataagtgaattgcgtggactcagctaagcttccagagtccccaggtgggcagggggaggccatttgccagtggggctggggctcaagctctggagccagcggttctgattcacctgataacgaaacgctgcacaccaggcttggggttccctaagcccgctcccagtgtggggagctgatgccagcagcttaatggaaagttgaagctacttcaccctcccataccccgacaccccgggatccttgtcccacacagccctgaggccacctcaccctcctgcgccccgacaccccgggctccctgccccacacgaccctgaggccacctcaccctcctgtaccccgacaccccgggccccctgccccacacagccctgagrccacctcaccctcctgcrccccgacaccccgggctccctgccccacacaggcctgaggccayctcaccctcctgyaccccracaccccgggcyccctgccccacacagscctgatgccacctcaccctcctgcaccccaacacccygggctccctgccccacacagscctgaggccayctcaccctcccgtaccccracaccccgggctttctgccccacacaggcgtctctgagcctttcccagggtcccacgctccctcatggggctgaggcaggaggctcccctcccctgttctgccccacctctcagcctccatgagtacccacagctgtgcctccaggtctcccccacagtgcccacactgccccgaagcctttctcgaccccgtgtcccctctcattascctccctgaccttggtcaccctccttcctcaagggtgccgtctacactggcttctccactctcagccagtgactccttgccccgctgccgtcccatctcgctgctgatctgctcgggccatgggatccagcaggcatttcttygtcccgatcggacctgactttactactctgaaacttcctcctccccaagacactgtcttccttgaatttccaagcttccagctccgggatttcctggctcctcttttgggaaggctgcccattgcttgtactctcttcactgcctgcctcccgccaccccaaaaacacttcagagcatttcagatataacccagcggcgaagggctgggaaagggacccatccaggccatgggtccttctcgagggctgggcgtgctgcctggcctaggaggcccccggcctgtgcccccacctaccagggcctcaccttctgacagaatcggcttagagagcagaaaccaagtcctgggggagcaggctgcactgcctctctttgtggaggaggagggcgggtgmtgccaccaggggaccagggtatcatcaagaggcctcccctggaagtgcctgccctcccccagtgctcccttcaacccgcgttgctggagtggtggctctagaagagtggctttctcagaggtcaccaggaacttggcgatgtttgccacatctacacctccagacctcatgaccacggtctggcttcatctggcatgagacgtcccttagtccctcctgattcaggaaggcccagaccccacaccacactctgcctgctgctgagccctgcatcagccaccagcactgtcacctgcccagctgtctcttttcagccttctctaacatgcccatacagccagaacagtctttttaaaagtttgtcaaccccatcaaaaagtgggcgaaggacatgaacagacacttctcagaagaagacatttatgcagccaacagacacacgaaaaaatgctcatcatcactggccatcagagaaatgcaaatcaaaaccacaatgagataccctctcacaccagttagaatggcgatcattaaaaagtcaggaaacaacaggtgctggagaggatgtggagaaataggaacacttttacactgctggtgggactgtaaactagttcaaccattgtggaagacagtgtggcaattcctcaaggatcgaaaactagaaataacatttgacccagccatcccattactgggtatatacccaaaggaatataaatcatgctgctataaaggcacatgcacatgtatgtttattacagcactattcacaatagcaaagacttggaactaacccaaatgtccatcagtgatagactggattaagaaaatgtggcacatatacatcatggaatactatgcaaccataaaaaaggatgagttcatgtcctttgtaaggacatagatgaagctggaaaccatcattctcagcaaactattgcaagaacaaaaaaccaaacactgcatgttctcactcataggtgggaattgaacaatgagaacacttggacacagggaggggaataccacacactggggcctgttgtggggtggggggaggggggagggaaagcattaggagatatagtgtaaatgatgagttaatgcatgcagcacaccaacatggcacatgtatacatgtgtaacaaacctgcacgtagtgcacatgtaccctagaacttaaaatataataaaaaaaaaggaaaggaaaaacataaaaaacatcacaattgtaaataaggaccaaaaaaaaaaaagttttgtttgtttttgatggagtctcattctgttgcccaggctggagtgcagtgctgcaatctcagctcactgcaacctccacctcccgggtccaagtgattctcctgcctcagcctcctgagtagctggaatacaggtgcacaccactgtgcccaactaattttttaaaatatttttagtagagatgtggtttcaccatgttgcccaggctggtcttgaactcctgtactcaagcgatcctcccaccttggcctcccaaagtgtgctgggattatcagcatgagtcaccacacccggcccccggaatggtctttctaaagttcggccccgtcatctctaaatggtgctgtggttaccttcctggacctcctctgcctcatttcttgtggcctggctccctgtccccagcccagcctcctgccccacagcataggcatgccccctgcagcctgcagtggtgggagctgactgatcactgcctgccccctgtccagcctcctttctaggcttttccttggaagagggtttttggaaggacttcagcacagaagtgccgtgaagagatgggtgtttcaggaagtcgctcttctgacttaagaatattaaaaatggaagaaaacactgcacgcagcacttctgctcgtaggactctgccttcaaagacatgcacacttgtggactaagaggatgttcattcattgcaccattgctgatgaggtcataaaattggaggccgctgtgaggccttcagagggactggtgaaagagaccccagcacagcggcctggggaggactctatggcttttttttttttttttttttcttgtgagacagagtctcgctctgtcgcccaggctggagtgcagtggcacaatctcagctcactacaacctccacctcccaggttcaagcaattctcccatctcggcctctcaactagctgggattacaggtgtgcgccaccacgcccagctaatttttgtattttttgtagagacggggttttgccacattggccaggttggtctcaaactcctgacctcaggtgatccacccaccttggcctcccaaagtgctgggattgtatacaggtgtgagccaccgtgcctggcccccattacatctttttcaaatttaacacacgtgtatgtaaggggggtattcagtgagcacttgaggaaggtacagaccccctagccctgcgctgcactgagcttttgacagccccagtgcctggcgagatgaagctgcatggtgttccaaacatttcttccagtcagttcttctctcatgataagtgctttacctgttactctgttacctttgttaaataaagttagtatgttgcattttaaaaataataagaggctgtaatccagcactttgggaggctgaggtgggcggatcaccaggtcaggagttcgagaccagcctggccaacatggcgaaaacttatctctactaaaaatacaaaaagttagccaggcatggtggctggcatctgtaatcccagctactcaggaggctgaggcaggagaatcgcttgagcctgggaaatggaggctgcagtgagctgagattgcgccactgcactccagcctgggcaacagagtgagactctgtctcaaaaaaaaaaaaaaaagaggctgatgcaggaggatcccttgaggccaggagtttgagaccagcctgggcaatataaagacaccctgtctatacagaaaatattttagaaaataagccaggcatggtggtgcgtgcctgttgtcccactactcggggggttgaggtgggaggatcacttgagcccaagagttggagrctgtgtgagctgtgactgcaccactgcactccagcctgggtgayagagcaagaccctgtctcaaaaaaaaaaaaaaaacatggagactcgtgtgtgtacacagcaccagaggacacaggctcaaacgtactgtcattatggcgagcacagcaccgagaggggaaaggggtcccgtgttttctcctgggtgcttctatacaatttgagatgcatccatgtattgttagtgcactttagaaatgagaaggaatgtgacttgcctgcctcgtggactgtggggttggagctggggagcgcaggagtgccgtggggtccttctgccgcagctcgcccgrgccttgtgctggaggcacgtgcagggagcaccaaggaggaaggcaagctgggtgcccctaacccatcgcgcaggaggtcagtgggatggtggtgtgccctgtgtctgccaaggagacgcgtggtccctgaagcacatgaaaccaaattccacgctggaggtccatagaccagctgccgaagaggcccccacgcaggtccccaggtggcattgaccttgtccagggcatcacagttctcaacctttcccctgaggtggatttcggggttgagtgccccctttttaagctcagatgcagagcatggagttgatgacgccccacagtcatgcacagcaccgcatccgtccacgacaccctcattattctagtcctgtacactctcccacaggcagccgtgcccacgtgcttcgtgtatatctttgagagtgttcttgcaaaacgtgtccaccgtggatgtcctgaagccagccagcctcccggtggcctgtgggatggtatggtgcaggagtgacagcgcctctgccggggcttcccttcattcccccascaacactggagaccactgaagtctctgcactttgcaaggacggaggaggctggctcagaggggcccagaggcttcccagagaccccctacttgtcagatcccggcaccgggggctgcctttctggcctcacccggggcatagtgggctgggtccgccctgggggcctgctttgtggygccccacctctccccgcggtggaatctccacggtcatttcagagggaaggtcatgagaccctgggcaggaaggacttgccccgggggacagaggcacgctgagggagaccccggttgcagcctggagccgcaggcttttcccactgggccctcgagtcctctcctccccgaacctgggtccttctcttgaagagaggattcgggctcagggtaggctgacctttgctgagcagatccggcaataggtggtgacataacccactccttgctttctgggcaagcctggtggccccagggaacttcatcaccctcctcggccccctgcctatggcctgagcctgggtgccagggygctgctgagaagggcacttggcctctctctgccacccaaatgctagacacagtccccaggaaagggcacagtccccaggaaagggctgacacaaagaccacccttgccctccragagtaggaaaggcggcgggcacggtcacgggcagtcctccaggcacagtggcaggagcccggaaatgttggcagccagcccctcttgtctgcagaggggagccctagggggccctgagcctccggggaaaatcagtgctagaggccccttcttttatgggctcgggaaccgggctggtgcggagaagaggtggagctgctttcctggcacctgctctctcctggcaggtgaagaagcttcccttaagcactctgactgctgtgaccaccgcagtcgtgataaggtcgcagtaatgctcagcagagggacttcacccacggcgaccgctaagccagtgtgtgtgtgtgtgtgtgtgtgtgtgtgtgtgtgtgtgtccaggaggcaaacactctagaaagagacagaaatgtcaaatgtcagcagataaataacaatatataatatatataatataaatattgtaataaaccaaaaagtgtttcatcttatatatgtgatattctttaattcccaaccattcaaactgaaagtgcagctgaggctgggcacagtggctaacgcctgcaatcccagcactttgggcggcgaagacgggaggattgcttgagcccgggagtttgagaccagcctgggccacagagtgagacctcacctctatatatttttttaaataacaaaattttttttgttttttgttttgttttgaaacaaggtctcactctgtggcccaggctggagtgcagtgatgcgatgtcagctcactgtaatctccacctcctgggttcaagcaattctcccacctcagcctcccgcgtagctggaactacaggcatgcgccaccacacccagctaatttgtgtgtgtgtgttttttggtagagatgggggtttcaccttgttggcctggctggtctcgaattcgtgacctcaagtgatccgcccacctcgggctcccaaagtgctgggattacaagtgcgagccacggcgcctggccagaaaatattgttaaaaataaaaatgaaagccaggcacattggctcacacctgtaatcccagcactytgggaggctgaggtgggtggatcaygaggtcaggagttcgagaccrgcctggccaacatggtgaaaacccgtctctactaaaaakacaaaaaatagctgggtgtggtggcgggtgcctgtaattccagctactcaggaggctgaggcaggggaattgcttgaacccaggaggcggaggttgcaatgagccaagatcgcaccactgcactccagcctgggtgacagagcaaaactccatcttgggggaaaaaatggaattaataaaaatataaatgtgctgcggaggggcattggtgtgggggggcttgagtcaaatctccattgtcccgtcctgcccctcttcccactccctcctgctgaacttaccccactgctcaggtcaaggcagaacggcccctctagttaggagaaccattcagacccagacagtcacctcccaaaaagggaaagagcttgggggtgctggaggtttagtagctgcttttggagaaatcccaaagacaggagcagcaccaggaggccagtctctggaaaacaagtacagtggaaaaggtagattctggaaaaggggccatatggcattccagaaagagccctgaactttctcctgccaggtgacagccccagcatcactgcagtggcgcccatgagggctgtcccaagggagcttctgtcactctgtgctgggcgcgctgtgggtgctcaagcagtgccagtggagtgtgaagtcgctgacgctgaccttcatgtgggctctcacattgaggtgggcgatgagatggagaagtctcagaggtggctgcagtcgcggtctgttcctgaacaggctcgccaaacttgggttggttggtttttttcaaaacgcctcctacacaggtcaagagaccgccacacacacagtgtggacctcagtaccctccacacaaggtacaggaaagtcacttatcagccaggcatggtggttcacgcctgtaatcccagagctttgggaggccaaggcgggaggatcgcttgagcccaggagtttgagaccagcctgggcaatataggaagaccttgtctctataaaaaaaaaattgttttaattagccaggggtcgtggcgtgtgcctgtggcctgggtactcgggaggctgagacaggagggtcacttgagcccaggtggttgaggctgcagtgagctatgattgtgccactgcactccagcctgggcgacagaccgagaccccggctcaaaaaaaaaatggtcgtttatctccacctgctgcccagcccctgagccagactctgtcctgctgcccctcctccccacagccccatccgacttgaggccttgggctttgtggcttcaggtacccactcctcctttccatctccctgccctgcccggatgggatgctaacacttctcacctagattgattactgccaaactgtccccacggcctcccctctccacctgccagccctgcctcccgccagctggaagtccttgagtcgcctcagtagcctttgagaccaagaccaaactctctatttagcacagaagcccacctgctaccccccacaacagctgctctctgccttccagccgcactgaaccactgcgggtcctgaatgtccacagcggccacccccaccccrtgccttcccgccagcggctcgatcctcctggactgcctctccgcctctttccaaaacagcagaggccccacagttcacaagcctcagggggcaggacccaggagtccaggcaccattgccccagtagccatggaaaaggggcccctcagcacaggagtgaactctttcccagtccaaacaaaactacaggaactctcctctttgcctggtattaaaatattcctttctcatgttttcaaagaaatactttcatttccttatacaaaaaccacgcatagaaggtagttaaaaatacatgcataggcccggcacggtggctcacacctgtaatcccagcactctgggaggccgaggcaggcagatcgcctgaggtcagaagttcgagacaagcttgaccaatatgatgaaaccccatctctactaaaaatacaaaaattagccagcgtggtggcatgggcctgtaatcctagctagtcaggaggctgagacaggagaatcacttgaacccaggaggtggaagttgcagtgagccgagattgcgccactgcactccagcctgggcaacaagagcaaaactctgactcaaacacacacacacacacacacacacacacacacaaacctggacagaaaaaaacagctgaagctccacctcctcctccgggcagccttctttgaccaccatccaggttggtggtggcccctggagtgtgccaggtcacactcctgccacgggaccccaggcaggcctgcaggctgccgttctgaagacagtcaccaacccagggaagtgccggggggcacatggagtgaacaaagtcatgctctgtggcttttctccaccgggggcaacggggctccctcctttgatgctgtttgtggccctcagatccgatgacaccctcaggtgcacctgcgcattgccagacacacagagggggtgtcgggagagccccagggcctccaaaagcaacccgttggctagaaatgcagggaggttttgaaacatagttgtgaataattgtcagaaaaaccacagttgaggccaggcacgatggctcgcgcctgtaatcccagcactttgggaggccaaagcaggtggatcacttgaggtcaggagttcaaaaccagcctggccaacatagtgaaaccccgtctctactaaaaatacaaaaattagccaggcttggtggtgcgcacctgtagtcccagctactygggaggctgaggcaggagaatcgcttgaacctgagaggtggaggttgcagtgagcggagatcacaacattgcactccagcctgggtgacagaactagaccctgtctaaaaaaaaaagaaaaatcacagttgactggaagaattgaaaccctaagccatgtcacctacctcttctacgtcctctaaccaatttgggtccctaacccaggttggtttttgttttgttttgctttgtttttgagacagggcctcgctctgtcacccaggctggagtgcagtggcaggatctctgctcactgcaacctccgcctcccaggttcaagcgattctcatgcctcagcctcctgagtagctgggattacaggtgtccgccaccacgcccagccaatttttatatttttagtaaagacgcggtttcaccaagttgcccaggctgatcttgaacttctgacctcaggtgatccacctgccatggcctcccaaagtgctgggattacaggcatcagccaccacgcccagcccccaacccagtttagaggaggagccatctcagggggcacccctgaccctcatggacactgtgcacctctgcctgggccaggcacctccatcccctcttcacacacacacgtggccctgcctcctggcagcagctcctcaaagggcactggaaggtccacttgccccaccccacctggcatttggactataaagcaggcgcctagatgggcgaccctgtgtggacacagtccatagctcacagccatcaatagcacagtgttccacggtgcgtacagagagcctcactccggctccatggaatagacgtgaaagtcaccgaggtgcgtttccaacctcagaattactcagcagccctttcctgcrtcactggctcctttttgattctgcaaggaggcccttcccagcttccctcttgatgcccacatcccccttcccttccaggcagccccacgcctctccaggcccagagaaaataaaagccaccaggtgggaaataagccctcccacgggccaaagaccccttccctcacacctcctcctactcctgaatcttcacccaccctcactgcctcctctgggtccttgaggggcagacatgcmtcttcctctgtgccagtgacactggccccaccggctccattgccatcctctacctgcaagcacagccccgtgcctccttccaaatgtgacagtcctccaagcctgcctcttcctctcacccagagccagatccgttcattttattccacttatttatgtcttgaaaatgtaatccattcacacaattcaaaactgaggttcaacaagtgccctcccactcatccttgtgtctcacccattctaggcccttctcactgttagcattttcttagtcatgcctcaaggagagtgagtgacttttttttttttttttttttttggatacggagtttcactcttgttgcccgggctggagtgcaatggcgtgatctcggctcaccgcaacctccgcctcctgggtttaagcgattctcctgcctcggcctcctgagtagctgggattacaggcatgcaccaccacacccggctaattttttgtatttttagtagagagcaggtttctccatgttggtcaagctggtctcgaactcccgacctcaggtgatccacctgcctcggcctcccaaagtgctgagattacaggcgtgagccactgtgcccaacccaatttatatttttttaatggagtctagctctgctgcccaggccgaagcgcagtgacgcaataatacttcactgcagcctcaaactcccaggctcaagtgatcctcccacctcagccttccaagtagctgggactagaactgtgcaccaccacaccaggctaatttattttattttactttttggagagatgaggtcttgctatgttgtccaggccggtctcaaacttttggcctcaagcagtcctcctgcctcagcctcccaaagtgccaggactacaggcgtgagccactgcacccagctgagagtgagcaatttttacatgacaatatctttatatattcttccctatttaaaaaaaaattgagggctgggcgcggtggctcacgcctgtaatcccagcactttgggaggccgaggcaggcggatcacgaggtcaggagatcgagaccatcctggctaacacagcgaaaccccatctctactaaaaatacaaaaaattagccgggcatggtggcgggcatgtgtagtctcagctactcaggaggctgaggcaggataatgccgtgaacccgggaggcagggcttgcagtgagccaagatcacgccactgcactccagcctgggcgagacagcgagactccagctcaaaaaaaaaaaattgagatactggctgggcacagtggctcacacctatcatcctggcactttgggaggccaaggcaggaggatcatttgaggccaggagttcgaggctgcagtgagccatgattgcaccactgcattccagcctgggcaacagagcaagattctgtttcaaataaataaataaaatgagatattcacataccctgaattttactcttttaaggtatacaattcagggagtgtgttttttaagtacagtgcaactatcaccctatctaattccagaatattttcatcacctcaaaaagaaaccctcaccccacaacagtcactccccaactctgactccagatatacttttttttttttttttttttgatacagagtctccctctgtcgcccaggctggagtgcagtggcgcaatctcagcttactgcagcctctgcctcctgagttccagtgattctcctgcctcactctcccgagtagctgggattacaggcacacgccaccacgcccggctaattttttattagtagtagagacggggtttttatcatgttgaccagggtggtctcaaactccagacctcaaatgatccgcccgcctctgcctcccaaaatgttgggattacagtcatgagccaccgcgcccggcccagatttgccttttctatggttcatagaaatggaatcatatttggccagacgcagtggctcatgcctgtaatcccaccactttggaaggccgaagcaggtggatcacctgaggtcaggagtttgagaccagcatgaccgacatggtgagacctcatctgtactaaaaatacaaaaattagctgggtgtggtgttgggcgcccgtaatcccagctaccttgaggcagggcgcggggggttgaggcatgtgaatcacttgaacccagaggacagagctttcagtgagccaagattgcaccactgcactctagcctgggtgacagagccagactgtttcaaaaaaaaaaaaaaaaattgaatcattaaatacgtagacttttgtgtctggcttctttcacttagcacaatactgtccaggttcatccatgtccatatgtcattccgtcattccttttttttttttttctgagatggagtctcaytctgtcgcccagactggagtgcagtggcacgatctcagctcactgcaacctctgcctgccaggttcaagcaattctcttgcctcagcctccagagtagctgggactacaggcgcccaccaccacacccggctaattttttgtatttttattagagacagggtttcatcatgctggccaggctggtctcgaactcctggccttgtgatccacccaccttggcctcccaaagtgttgggattacaggcataagccactgcacctggcacccccccagcttttttttttttcttttttaagagggtctcactgtgtcaccccggctggagtgcaatgatgcaatcatagcagactccagcctcgacttccccggctcaagccatcttcctgcctcagcctcccaagttgctgggaccacagccacgtgccaccacgcctggctaatttttgtattttttgtagagacaggttctcccgatgwtgcccaggctcgtctcgaactcctgggctcaagcaatctgcttgcctcagcctcccaaagtgttaggattacaggtgtgagccaccacgcccagcctgtcattcttttgtatggctgaataatattgcattatatggcgctactcaacatcttttatctgttcattcgttggtgaacatttggcatgtttgcactttttgccttttataaagctcctatgaacatttgtgtatgtttttatttaaacacttattttcaggctgggcgtggtggttcacaactttaattccagtactttgggaggctgaggcggggggactacctgaggtcaggagttcgagaccagcctggccaacatggtgaaaaccccatctctactaaaaatacaaaatttagctgggagcgttggtgggcgcctgtagtcccaagctacttggaaggctgaggccagagaatcgtttgaatctggaaggtggaggttgcagtgagccgagatctcgctactacactccagcctgggtgacagagcgagactccatctcaaaaaaaaaaaaaaaaaaggcagctgggatgtttttttgagacacgaccttgcactgttgcccaggccggagagcagtgacgtgattatagcccactgcagcctcgaactcctgggctcaagcgatcctccttcctcagcctcctgggtagctgggactacaggctgacaccaccacccctggctaayttctataytttttgtagagatcatgttgccaggctggtctcaaatttcttggctcaarcaatcctcccaccttggctctcaaagtgccaggattacaggcatgagccgccacacccggccacagctgggattttgatagggattgcgttcaatctgtagatcacttctgaagtattgaaattttaataatattaagtcttttaatccatgaacatgatttccttccatttatttaggtcttctttagtttctttcaatgatgtttgtagtttctttttcttttggagatggagtcttgctctgtcacccaggctggagtgcagtggcatgatctcggctcactgtaacctccgcctcccgggttcaagcgattctcgtgcctcagcctcccgagtagctgggattacaggtgcgcaccactgtacccggctaatatttgtatttttagtagagaaggggtttcaccatattgaccaggctggtctcgaactcttgacctcagatgatccgcccacctcggcctcccaaagtactgggtttacaggcgcgagccactgcgcctagcctcatcttttcttccacacagatgcttcgtcttgggtaaactcctcgactcccaaggccccagcctccatctttacctcagagcctcctgaacctgctcctccagcctcaccttcctccagcctcaccgctcctccctggactttcagctccacacccctggggcctcagaactaccccttccggtttctcctgcgtaaccttccgcctaccttcctgagagtggttggtgacagcagccggggctagaaacctcgagcctactgtgcttgagtcctctcttgctctttacatcccaaatcccatcagttgtcacgccttgtgccttctgcctttcaaatattcagaaagcagatgtatgctgggcacggtggtgactcaagcctataatcccagcacttcggaaggcggaggcaggagaattggttgaagccaggaattttagaccagccggggcaacatagtgaaaccccgtctctacaaaaaataaaaataaaaattagctgggcgtggtggtgtgtgcctgtagtttcagctgctggagaggctgaagcgggaggatcacttgagcccggagttcaaggctgcagtgagctacagtcatgccacttcactccagtctgggcaacagagcaagatcctgtttaaaaaaaaaaaaaaaattggccaggtgaggtggctcacccctgtgatccgagcactttgggaggccgaggcgggtggatcacgaggtcaggagatcaaaaccatcctggctaacacgattaaaccccgtctctagtacaaatacacacacacaaaaaaaaagaaagaaagaaagaaagaaaattagccaggcgtggtggctggggcctgtagtcccagctactcaggaggctgaggcaagagaatggcctgaacccgggaggcggagtttgcagtgagccgagatcgtgccactgcactccagcctgagtgacagagcgagatcccgtctcaaaaaaaaaaaaatttaaaccagatctaaagagaggcctggcgtggtggctcacgcctgtaattccagcactttgggaggacaaggcgggcaaatcacctgaggtcaggagttcaagaccaacctggccaacatggccaaaccccgtctctactaaaaaatacaaagattagccgagcgtggtggcgggttcctgtaatcccagctactcggaaggctgaggcagagagaatcgcttgaaccgaggacgcggaggttgcagtgagccgagattgtgccactgcattccagcctgggcaacagaccgagactccgtctcaaaaaataagaataattggccaggcgcagtggctcacgcctgtaatcccagcactttgggaggccaaggcgggcagatcacctgaggtcaggagttcaagggcagcctgaccaacatggagaaaccctgtctctactaaaactacaaaattagccaggcgtggtggcacatgcctgtattccaagttactcggtaggctgaggcaggagaatcgcttaaatctgggaggcggaggttgcggtgagccgagatcgtgccattgcactccagcctgggcaacaagaacaaaactccgtctcaaataataataataataataataataataatttttaaaaattgtaaaaagatgtatagagcagactctatttggtgcctccagcacccaattctgcacactgggtaacaagatggctggcagccacccagccctaagcatcgggagctcaggtgtcaacacctgaggcaggtgcaggaccagggcaggagaaggggcttctgcagaaagcgcctaagggaggtggcacacactgagctggtctgaatcagcagagaggagaaggaagcgtttgagtcacgatgcatggtgaagaagcccaaatgcggggggtcaggaacagtcagtcctcaggggaggcaggagagcaggggagtgaaggtgagagcggggggtggagtcagatgaggggctcaagttcattcatatcccccccactgcctgcgtgacgtgggctacagtacttcctactgaagcctcggtttccttatccgaaacctgaagtgtggtggggatcacctctattcattctttgtaaatgaaatgtgcaggacaagcttaaggggggaccaaggaggggaacgcatcttacaccttgcaaaggccaccaataccaagtccaagtgcccaggctttatttttcagatggggtgaccttcacgcagtgaaggtattcggtgggacttcttttttatttatttatttatttttgagacagggtcttgctctgtcatccaggctggagtacagtggtgccatcatagctcactgcagcctccacctcctgggctcaagcgatcctcccacctcagcctcccccgtagctgggaccacaggcacgcaccaccacacctagccagttttttttctttttgtaaagacagcgtcttgataggttgcccaggttgctctgggactcttggcctcaagcaatcttcctacctccacctccccagttgttgctccatggtgcctagccaagatgagactctcattcaaacagtcaaaaacccgacttaaagtagctcagacaggcacagaatggattggctgctgttgtggactgtccgagggtggctccatctgcaggcactgttggatccagtacccaaggatgatgtcccagcatctgtctctctgggatctcacctttatcccctgccctcactggctgcgtctcatttctgcttccctctgtgtggcttcctgttggtggcagggtgaggcccccaggacagcaggcagcctcagcctcaccctttcccagtactgagacccagaaaatcccagggaaggctttgattggcttagcttgactcatcactgctcatccctggaccaatcagaagctcggtggtgctccctgattgaccacctggtttagtgctgcttctgcgctggaggtaggagccacgtgaggaggtcctggaattggggaggcagggtcttgggaggccaggctgtgacctcctcccccagggagtcctgcggattctgaacagagtgatgaatcctctgtgaggggcagggagccacagatggagagggatgatggcggcggatctgggctgtgcccggagaggggaccctgccaggagtgagtgtcttatggaggcaggacgggctcctgcagttcccaaggtgcccttaggcccccacagcccctgtccccagccttacacagagtcctgagacttcggggaaatgacttcactgtgcccgtttcaccggtgaggttcaatgactttcccaacatgatgggagtcagaggccccaggtcgcacatcactagagcacccagcctccactcagtccagggggacttctacggggaaccagcactgggtgtccagggccagtggcagaaccaggggcgcttccttcatcacaccaatacgtttgggagggggcgagctcctctcgccctagttgctagcggggctgcaggagaggcacagaccttgcagggggtgggggaattagggccaacaggggcagtgaggaaggcccaggggtattgcctgtgggagtccagcggaacctgggcgggcttcccggaggcggcggcctccgagcccctgggcacccgtgatccgccagggcctggaagaaaacggacggagcaggagcagagggaggggagacgggcagtggtgcggcccccacccgggggctcggggcgcacaggggtccccgccgcccrcccggccgccccgcgattcctgcrcgtcagcagagcggaaacgcggagcagcgccagccggggcgggctggatggggcctggcagcgcggccggcgctccgcgggttcggttccgcccgcgtttgtgttggcagcggcccacggckcgcggccgggcgcatgaaaggggcctctgtctgcgccccagccrccccgctyscctttcactcttaatataatcttcacttcatttttaacccagcggaggttctcttggaatttttccccttcttccaaaaatacatgtgcgtgcgtgtgtgtttgcaaaaggccttgacggtgaaggtcgggattgtccccgggaagggaagggaagggcgaaacccgaggcggagagggagggagacaggaatgtctttctttcttcctgtgcccgggcctcctcggggtcgccaccgccgctgagggtcccccatcctgcgcccccctccggggactggrggtgcaggacaggatgggggggtcctcctctgaccacccccacatccccaaccccgggatgaatgaacgggctttttggaaattggggtcagcagggaggggtgggcgyctcctccaggggtcgctccccggagctggtcagagaatggtgtcaccaggtgtggccagctggggctgtcctcccagagcgggtaggaagggagacaggacatcagtcctgctaggaaagaccctactcttttttatttttatttttttctctgagacagggtcttggtctgtcacccacactggagtgcagtggtacaatcatagctcactgcagcctctacctcctaggctcagatgatcctcctgcctcagcctcccaagtaactaggacttcaggcagtgtcaccatgcccagctaatgttttgatttttttttttttttagagatggggtctcactatgttgcccaggctggtcttgaactcctggccttaagcaatcctcctgccttggcctcccaaattgctgggattacaggtgtgagccaccgtgcccagccctatagcctactctgtgctgatgcttgcttgtgggcttaaatagcctgccacagtgtccggaaactgtcaccagtcagccctttgttcacttgctgggcagaggggcgttacacctgagggaattttccagattatacccacggaggctgtttggagagttctcacttcaaacatctcagggctcatcacagagctttccatgcatgttcccaggcaagtctcttgtggtcagggaagtcaagtaagattatccccgcagaagggaaaaagaaggctcagagaagacaactagcttgtccccaagttgtggagcatgagggagctagggtggggatgaaaaagcgggtgatgggaagcccaggttctccctgctggatgcctggttttcaaactgttttctgcagagcttctgttcatattgggggtcctggaaagtatgattctaactatctaaatatatatatttaggccaggcacagtggctcatgctggtaatcccagcactttgggaggtccaggtgggaggactgctcgagcccaggagtttgagaccagcctggcaacatagtgagaccccatctacaaaagtaaccttctgccgggtgcggtggctcacacctgtaatgccagcactttgggaggctgaggcaggcagatcacctgaggtcaggagtttgagaccagcctggccaacatggtgaaaccccatctctactaaaaatacaaaaattagcctggcgtggtggcacacctgtaatcacaactactcaggagtgtgaggcaggagaatcgcttgaacctgggaagaggaggttgcagtagctgagatcggcacagcagtctgggtaacagagtgagacttggtctcagaaaaaaaaaaaaaagacttatttaaaaaaaaaaatagctgggcatggccatggtggcacatgcctgtagtcccagctactcgggagactgaggcaagaggatcccttgagcccagaaattggaggaggcagtgagctatgattgtgccactgcactccatcctgggtgacaaagcaagactccatctcaaaaaaatatatttaatttgtgtgtatatttggacttctggtgtgagcaatatagtagtaaattcgatagcctgaaaactatcctactctaaacgtcttggttacaaaacaccaaccacatcctcttttttgttttaattccagagtcggggtcttggtctgttacccaggctggtctcaatttttttttttttttttgagacgaagtctcgctctgtcgccca

SEQ ID NO: 94253 - DNA, 26626 bp, Homo sapiens
cagccaatgtttttttttttttttgagatggagtcttactctgtcgcccaggctggagtgcagtggtgcgatcttggctcactacaacctccgcctcccaggttcaagcgattctcctgcctcagctcctgagtagttgggattacaggcacccaccatcatgcccggctaatttttatatttttgtagagacggggtttcaccatgttggccagactggtcttgaactcctgacctcaagtgatccgcccacctcagcctcccgaagtgcagagattacaggtgggagccaccacgcccggccatttttttgtgtgtgtgtttatagtagagacagggtttcactatgttggccaagctggtcttgaacttctgacctcaagtgatctgcctgcctcggcctccgaaagtgctgggattacaggcaagagccaccgtgccaggccctgaaacatgccttcttttgtctaaagtggctgtcccctctcagggctgaggatgtgaattttgaagggacaagggtaggatgggagagccaacccaccacaagactagtgacaggaccctagccttaagagacactggtgaggtggctagatccatagcgacgctgtgacttcaggacagatagtgagagatgagctctctgcatgtgttgagcatgtttggcctacgcaaggtcttgagatccaggctcagctctcaccatggtttgcacacattaacagagggacactcagctgctttgcacaaaaccacgacggctgcaagctggacctcggagctgagctgctgagggcaggctaaggtaggtcttctcccatgatgttgtttttcttttttttgagacggagtttcactcttgttgcccaggctggagtgcaatagcgcgatctcggctcactgcaacctctgcttcccaggttcaagtgattctcctgcctcagcctcccgagtagctgggattacaggcatgcaccaccacacccaggtaattttgtattttttaaaagtagagacggggtttctccatgttcgtcaggctggtctcgaactcctgacctcaggtgatccgcccgccttggcctcccaaagtgctgggattacagaggtgagccaccgtacccggcctgtttttctttttagagatgaggtcttgcgtgttgcccagctggagtgcagtagctattcataggcgagatctttgtacactagtcttggactcctgggctcaagcgatcctcctgcctcagcctcccaagtaactgggaccacaggtgtgtgccattgtgctgggctttccctcatgatcttccccatgggcaggtggcagcatgtgacttcatcatggcgctgaggaactgagaggaggcaaaggccaggacagggcccgcttttctagtgcactgaattccagagtgtggactgaggtagcaccaccacttatcagccgtccctctctcagcctgtttgcacagggtctggcgaccttccaggaagcccaacagtttgaaacacagacctcttccatttccaaaaaagggtgtgttggtggccactccaagtcaatcgtgacccagtaggacagctctgtggcctaaggtaagctattcctaatcaatttggctcatacagaggtgcactcaatgaatgaaatgccggaacctcagaaggaagagggagaaagcctacttcctcaacactgggatctgtaaagggtcatctcacccagcaataaataaagggcaacagaagggaaaaagcagtttggctcaggagaaataaagtcccattcaagcccaaagacaccaccacaattacctagacctgtgcgcctttggttcctgtcttgtggcctctgtctccccatttaggaaccacgcctgtggctcactcggcctcgtgctataccagtaaccccctccccaccccactgagcacagcctgggccaggctgggcccctttaccctattctcccatcctaggtccaaacttctagggagttttgtttcagtttgtgaaaaagaaaaaggattaaggctgggcatgtctgagccatcctccacaaccaggaattatggaatagcccctagaaggcaggggctaaggtcatggccgagttcagcctccacttgccaggtagcagcagagaaagaaaagactcaagccaatctgagtgggtggggggaaaatgtgaccatgggaaccttttgggggtccttcaaaaagcctcccacacattttcctttccatgaagagcacaggctcagtttcagggcaggcagggagtggggtccctcaggcattagctctggcctacaaaaccctgaggcataaagggatgacattacggagtaggccttgtgctgagtcaggggagaggcttaggattggatgatggttagtaaaccttatagaatactttgcttagagtttcatggaatgtcccagaagtttaccttagtctggacccacccccagtctgaaccttctggaattttctatgtaccccagattcgggggctcacagggaacgttcctggctgggatcttgactgagaaaacaaacttcagaggtctatctcaaggagcccatgctattagaccactagtgctttacaaacccacatcgaaaggaggccacctgtttcactagaacaaaaagcccttgccccactgtttctgtcgtgcctgctttactggttgagaagcactagtttcagaacattttgctaaactccacttcgtgcagtttgtttttccagaaaaaagaaactccacttgctgcagttttgtttttccagaaaaaagtctctgtcctgttttctaaatatgaaacatagtaacaataaatgttcttttaaaaagtacatatccccttcccccaagtccaggctcactgagccaaacaggtctgaaccagattgggctcaaatcttttttttctttttctttttttttttttttgagatagggtctagctttgtagcccaggctggaatgcagtggcaggatcgcagctcactgcaaccacgacctctcaggctcaagcgattctcccaccttagcctcctgagtagctgggactacaggcacttgccacacccggctaatttttgtgatttttgtagagatggggttttgccgtgttgcccaggctggtctccaactcctgaggtcaagtgatccacccgccttgggtggatcccaaagtgttgtgccaggccccagatcttcattactgcatcatatgatcactgcaaagcctggagtaggggcatacccccaacctccgaggcaagagacaatcaatggtttccctttttttttttccttttcaggctagattggcacaatgatggaatggttttcaagaggccaagtaggaccagctgtgggtttatcccattttacctaaggattttacacaatacattgagtgcaggaatggcacrcaatgattgcactcagtaatataccaaaccactcctggctttgtttagaccctagacttgggccctcatccttctcgtagacctcttgcgaggattttccccttttacagattcacactcagtcccgaacagaaacacttgagcacctacaatctcacagccaactccctgccaacgtccagtgactcacagttaagagagcttcagcagcagctctgaccaaagtgatgaccaactacttaacatgaattagaaacagagcagaaaaaacacgcctttagcctgctctgcgtaaagaaccaagtctccaccatgaacaccaagccaccaactccccgtccctcagtagtcctgtgtactcccaaagccccaaaatttaccccagcctcaagcagccttgtttaaaaaattaaggaagggcctgtgataagcactgcaagttaaacagaaacaggggacttaagtgcagagtttgtcactctatttctgggaggggatgggctgcacagtgtgcaatggggctggctggtaaagggaggaccaggtgacagccagccacactgtctcaaggatgaacctggccctgctagcattatgctgtaatccctgtggattagaactatggataatagggccgggagcagtggctcatgcctgcaatcccagcactttgggaggctggacgggcagacagcctgaggtcggcagttcgagacctcagtctggccagcatggtgaaaccccgtatctactaaaaatacaaaacactagccaggtgtggtgggagcctgtaatcccagttacacaggaggctgaggcaggagaatcgcttgaacccgggaggtggaggttgcagtgagctaagatcgcaccactgcactccagcctgggcaacagagcgcaagactccatctcaaaaacaaaacaaaacaaaaaaccccccaaaaactatggataataaagcatgacagacctcaagatgccaaatgattttctcctctgctgtcatgcctacagagtaacttctccaaggtcacacattaaatatgggcacaggaacactcattccttatgctcaatgactttttctcactcctacatgctatcaacataaggaggagtgccccagggggctgaccttagcgggaggaacgacaggctctccaccgatcccattcttaccctggaccaggtctcacctgcggcttggggaagtcacagaaagacaagtttcgtacaaccccagaccttttcttttggtagtcaacaattggtcacattgcacatttcaaggttacagaggcccaccatacacatgcggggcaggaggagataaatcttgcttggggctaaacaataaagctacagcgagtgttccagaagttgaccacatctggaagcaagaagacagactctggaagaagcaccctagagactccaggaacccccttcactcctgggctttcgggactctacagcgtggggcctctttctcagacatcgaaaggcctccttttctggaccacagtggagcgatgtgcaggtcatcggctaagctgggcgggtcggggagggcagggggagtacagttccttcggatcccagcaaaggtagactatcaatggccaagggttcagaggcaggaaaaaaggccgtttctggggggttggctggggacactccccttcccttctctctccgattaaatataaaagccgatgatgatgaagattgaaaagatgaggaaaatggcagccgtgtctcgggtatcctcccagcggaggcctttcatggaccgatactcctgccgtttgcgaagggcctcccgccgggccctcaggcgccgttcccgctccagttgttccccrtagtgggcctggtagaaggcgtcaaagttgaacatcgtgcggttggcgccgggggaggcccgagaaccgtcgtgggtccgagaggtgggcggcggggtacgcggcgagccggggtcgggtgcgggcgtcctggagggccggacgccaggtccgcgcaggtcctcgtcgctgagtaggccgcgatcatacttgcgacggagggtggcactgcccagcaccacgtaggcctgggagatgcgcgtgaagcgctcggcggcctccgcgctcccggagttgcggtccgggtggtagagaaagcactgacggtagtaagccgycttgatttgggcctgcgtggctgtggaggggacgccgagcagatcayacagcgccgtgcgcgaatacgagcagtcgccctgggaataagtcctcgctcctaggcccaggctgggtgcagaattttgtggaaagccacgggcctgcagcaacctccaaggtaacagccgctgccaccatcgccagcgcatggctgccatgttgaattgattcggcaggcggtgcaagagaaaccggccaatgagaggagtcggttggtcgccctgtggccagtcacgtaaaggggggggcggggcggtcgtgggggtggaacatgcgtattactaagcggtcgccgggctgatgacataaaaaccgggtgccggmaggcgccagtcgcaggtgtgctgctgagscgtgagaatggcgtcccgcggccggcgtccggagcatggcggacccccagagctggtaagtcccggggcccgcggacacccctctccccacttctgcggccaccgcgtctgaattattcctctacatgccattttctctttttcgcagttttatgacgagacagaagcccggaaatacrttcgcaagtgaggggagcctgaatactgcggggcgtccgggggtcgggaagcggcaagttgcccctgttgctggcgttgcccggaaaggccgtagaatttgggggtgcgggaagggaaggacccgggtgggtgccgatttctgtctctggtaaatcaactttaagttgccgacctctctgggcctcggtacctcagcgttgaggtaggggtgatcgcgcttgctttccgtgggtggttttcaaagtcgaatgtgacaatttgtcctaaacatgtggtaaaagaggcgctgggcggtgggtacgggcgaggggtcagtcctggtgggggraaggaagtaatggccgtaggatgcttatcgtggcgccttgttgccaataaatctccaagacagcagttggtgtattattgtctgaatttcatagagggtagtttgtataactactgagttgtagccaggtgggagtggctcacgcgtgtaatctcagcaatcgcagcactttgggaggctgaggcgggaggatcgcttgagctcaggggttcgagaccagcctgggcaacgtagcgagcccccgtctccgcaagtaataaaaaaattagccgggtgtggtggctcccctctgcctctccagtagttgggaccacaggcgcgcgccactacgcctggcttttttttgtaaatttttgttgcgatggggtctcgctgtgttgcccaaggtggcccaagcccagggctcaagcgatcctcccgccttcgtctcccgaactgttgggattgcaggcgtgagccagcgcacctcgagtcgttaaaaaaaaaaaaaaagggggggggatgggggcggggggaagctggcgcggtgtctcacgcctgtaatcgcaacactttgggaggccgaggcagacggatcacctgaggtcaggagttcgagaccagcctggccaacatggcgaaactccagctctactaaaaatggaaaaaattagccgggcgcgatggcgggtttctgtaaccccagctactcgggaggcygaggcaggagaatagcttgaacccgggagggggaggttgcagtgagccgacatcacggcactgcactccagcctgggcgacagagcaagactttgtttcaaaaaaaaaaaaaaaaaaaaaaaaagatactttgtggtttttccgtgctctctcactgagagactagccctatttcagtaaatggttactggccgggcgctatggctcataccagtaatcccagccctgtgggaggcggaggtggacggatcacctgaggtcaggaattccgagaccaacctggccagcatggtgaaatcccgtctctactgaaaatacagatattagccgggcctacgggaggctgaggcaggagaatcacttgaacctgagaggcagaggttgcagtgagctgcgatcgcaccactgcactccagccttggygacagagtgagaccctgactcaataaataaataaatagctattggatactgtttcttttttttagggacagggtctctctattgcccaggctggagtgccatggcatgatccctgccgactgcagcctcaagccatcctccccagcagccggaactagaggcactcgccaccacaccggctgaaatagcttgataattttttgtgcgtgtgagacaggctctcattctatcgcccaggccgaagtgctgcagtggctgcaacctcgcctcccgggtagttggaactacaggcgcgcctcctcgcgcccgactagtttgtgtaatttttttgtggagagggagttttgctatgttgcccagggatctggtaagttgctcacgggatccacccgccttggcctcccaaagtactgggattataggcgtgagccaccaggcccggtccttgctgatgactttttatgtcgattatatgttgaagtgatattttgaacatattgagttaatggaaatacgttattaaatatatggggttaaaaatatgactccagaggccgggcgcggtggctcacgcctgtaatcccagcactttgggaggccgaggctggcggatcacaaggtcaggagatagagaaatcctggctaacatggtgaaaccccgtctctactgaaaatgcaaaaaaaaaaattagccgggcgtggcggcgggcgcctgtagtcccagctgctggggaagctgaggcaggagaatggcattaacccgggaggcggagcttgcagtgagccgagatcgcgccactgcactccagcctgggcgacaacagagcaagactccgtctcaaaaaaaaaaaaaatatgactccagtttcttttacctgtttctttaagtttcttcttsactggctattgggaagccatgcgtggctcacattctgtttctcacagacagtgctgctgtaggtttttgtgcattgttgatccttctagatgagagaaactatggagaataatttttggagaaaatgttttcaacaagtgctagagcagcccagcctaatagagttgcagatcccagtggttgtttattactagctaagtgatttgcttttacacatctgcttggcagctggtgcartgataagttgttaccacaaaataacatggtcctgaattacatggaatttttggggtcactttcraatggttgaatttgttgatcccaacttagaaggggtcagaaaagagtacctcgggatgattgatccgttttttgtttgtttttaacttggcttttttttgttttttgttttttggtctgggggaagtattcacccagaactcctttaccatgtccacttgtgtttctgccttaccagctcacggatgattgatatccagaccaggatggctgggcgagcattggagcttctttatctgccagagaataagccctgttacctgctggatattgggtgagattctggggcctggttcagattgtctaaggtggtgaagtgtctttgtaaactgaccctgagtgtctggtcrtgtcttccagctgtggcactgggctgagtggaagttatctgtcagatgaagggcactattgggtgggcctggatatcagccctgccatgctgggtaagtatgtcctgtctggcaccagggtggattaycctgatgggtgtggagaagccacaggtatttctctttctctgactgccttttctctaatgtagatgaggctgtggaccgagagatagagggagacctgctgctgggggatatgggccagggcatcccattcaagccaggcacatttgatggttgcatcaggtgagggtctttaattcctgcttttatttatttagagacagggtctcactctatcacttaggctctagtgcagtgtctgtgattatggctcacactgcagcctccacctcctgggttcaggtgatctgcccacctcagtctcctgagtagctgggactacaggcccacaccaccgtacctagctaattttttgtttttttgagatggagtcttgctctgtcaccaggctggagtgcagtggtgtgatcttggctcactgcagccttcgcctcccaggctcaagcgattctcctgcctcagcctcccaagtagctgagattacaggagcaygccaccacacccaactaatttttgtatttttagtggaggtgaggtttcactatgttggccgggatggtttcaatctcttgaccttgtgatccaccctcctcggcctcccaaagtgctgggattacaggtgtgagccaccgtgcacagcctaactttttttgtatttgttgtagagatgggtttttgcyatgttgctcaggcgatccacacacctgggcctcccaaaatgctgggattataggtgtgagccaccctggcctctttcttcctgcttttagtcctgcaggccagtgcctcccaaacctggctgtgcagcagactcatgcagatatttacaaatacacatcccatgggattttcagatttacaaggttagagcaaggcccaagagtgtatttttttggattctaaaactttgcagtctggccaacatgrtgaaacccwgyctctactaaaaagccagacgtggttgttgtttttttttttttgagatggaggctctctctgttgcccaggctggagtgcagtggcgggatctcggctcactgcaagctccgcctcccgggttcaagccattcacctgcctcagcctcccaagtacttgggactgcaggcgcccaccaccacgcccagctaatttttttatatttttagtagagacggggtttcaccatgttagccaggatggtctcaatctcctgacctcatgatccgccctcttcagcctcccaaagtgctaggattacaggcgtgagccaccgcgcccagcctaaaaagctagacatggtggtggccacctgtagtcccagctagctactcaggaagctgaggtaggagaattgcttgaacccgagaggcggaggttgcagtgagccgagtccacgccattgcacttccagcctgggtgacagagcaacacttcatctcaaaaataaaacttgtctactattgcgattattttgcattgccgggttcgggcaccactggtacagattctgtgtcagctttgtgtgtctggtggggcagaggaggtggtcttttagtctctagcggccattttatgggccccagccatcttgtgggccccagcagccatcttactttatttgccaacagataactggtagagagcgtctggacttgctctaatctcttaagtgcttcacagtcctttctctgtaatcagagtcgggttaaacatccacatagcacttcaataacagatcttagaatgttaaaattgattaagtttttcttaggctgctgtgatcagttctgtttagtttttggtgtggtgtgggagtgaaagtgagaaaataggggaggaagttacaaatcattacttgcaggggagacttcctttggttaccctaagttgagtggtggggatgtgaagtggggagccaggtgagaggtaaaaattcagattagaagattttccttttacatctgggaacaagacccaggggggttggggaataatttcaagggtagcagatgctttttggtaatggtcagatgaggtgttttaagctgtgaaaaacygaaggccagcagtatggtctgtatgtttcggaaggggatggtcagtttttgtttgtcttcggggagaggtgagatggtatagcaaactgtttttttggagacggattcttactgtattgtccagactggagtgcagtggcacgatctcggctcactgcaamctctgcctcctgggttcaagcgattctcctgccttagcctcctgagtagctgggattacaggtgctcaccaccatgcttggctaatttttgtattttagtagagatggggtttcaccatgttggccaggctggtcttgaactcctgacttcatgaactgcccgcctcaaccttccaaagtgttgggattacaggcgtgagccaccgcacccggcccagactttttttttttttttaaacatttgctacatgtaaggcgtacaaggtgctgtggagtacagggaaatgaaacagtttctgcgtgtaagactctccacggtttattaggtgctttaggacatggaccaggcaactgaatataagggcatgagtggtgtgtgccctagggagtcatggggctgccagagcacaggaaagccttgggtggaggggctgcaccttgaaggctgggaggaatttggatagtcaaggagagggtttctgagtgagggaacagtgggcagaggcacagatgccggtgggaaaggggtctgagatgagagggatgaacgagagattccacggaagatggggttgagtgtggttgcttcctagaaggcacttaagtgtgtcctaagaagtttgggcttgatggagtagatgatggggagttggcaggtgacgggatcagatgtgtgtttaaggaaggtgattttctggtgaaagaggagagagagttaggtggaagcatttgagctggtagcactgagcattggtgcggggaagtgaaagttgggagaggctgtgggacaagccagtggggtggaggtagggctctgtgtgtgtacagcagggcggaggggaagggcaggaaggaagacatagtgactggttgaggttttatttatttattttttgagatggagtcttgctctgttgtccaggctggagtacagtggcacaaggcttactgcaacctctgcctcccaggttcaagtgattcttctgcctcagccacctgagcagctggtattcaaggcacatgccaccaagcccagctaatttttgtatttttagtagagacggggtttcaccgtgttggtcaggctggtctcgaactcctgacctcaagtgatccacccatctcagcctcccaaaatgctgggattacgggtatgagccaatgcacctggctgcttgaggttttaaatctgggggttgtaaagacacttaacaggtagagtggaagggagtgatttaggaggaagggtgatgggatggctgtgtgtatgtgagtagtctaaagcctgtttccttggattggaggaagggaacaaggaggggtgtgtgggcagacagccttgacacggaggacttttcaactcaagatgcagatggaaacaaggtagaggaaaggtttcttgggactatgggacataaatgctgtccttctgtatgtcctatttttccagtgttgtagagtcatgacctgcagtggacctgcactttttttgtctttaaatttttaaatttaaaaatactttaagtaaagatggggtcttgctatgttgtccaggctggtttgaagtcctggcctcaggcaattctgtcttggcctcagaaagtgctgggattacagggcgttgaaccactgtacgtgrcctcaacctgcactttctaagaagggaagctgtgggaggaggggtttctcttggagagccaggacggatgatgtcaagaggcttgaagtggttgggggagcaacgtggattgctccgttgcctgactaggtcccttcctttttagcatttctgctgtgcagtggctctgtaatgctaacaagaagtctgaaaaccctgccaagcgcctgtactgcttttttgcttctcttttttctgttctcgtgagtataagatcttctccccatctgggttagctgcctgtccctccctagcactgcaggtagagtgaggaaattgaggtgtcccatgatgggtaagctactcatatgggaccgcatggggtggcaggaccttactgtggttacttctgtccaggtcctcagcctaaatggaagttcaagctcagtggactgatatactctaatcaaacccagaagtcactgataccaaaatcggagaccaatttattaacttgtaatagggcctacttctgttgattggtattcctatgtctattgcgctgagttttaatcagaagttggtttgggggcatggactgagcagagtgaggacagagatgtcgtgtccggaccatccagaggggtaccttccaaagtgcccacatccttctgactcctcacttatccctcctcctagtgctgatccttttcttcggatgaggaacaggatagttatttactgcaaagagagcctttattagctttgtcttcaaattaatgatgttaatttcagttgttcactaggattagctgakagtctgagattttaagtcctaaaaatgagttctttttaaattttgttttttgagacagacttttgctttgttgcctgggatggagtgcaatggtgtgatcgtagctcactgcgccctcgaactcctgggctcaagtgatcctcctgcttcagcttctcaagtagtttggactacaggcacacaccaccatgccaggctaattttttacttttttttttttaagagatggggtctacctatgttgcccaggctggtgttaaactcctggcttcaagcaattgtccggcatcaggctcccaaagtgatgggattrtaggcgtaagccactgtgcccagcttaaaaatgagtccgttttgaaggatctgagtggtttttgcctccttagcctggtctagcccacccctagttttcctggggtggactgcacctgccgatctggccactggtctttcttggggtgaactgcccctgctgatgtggccgctggtctttcctggggtgaactgcccctgctgatgtggccgctggcctttcctggggtggactgcgcctgcctatctggccgctggtcttgtgtgtcacatgagttctcctcctggcacactgggttaatattttagttctgaggtcctttgtgtttcctcttctccctgctggaaggctcctcccttatatgtttaaatagccagctcctcactccattcaaatctctgctcaagtatccatttgaaacaggcctttttggaaccaaaagtaaactgaactgaaaggaaactctgtcactttgtctaattcctctttttgtaacaaagaaaaaatttgctactgtgaattagttgcctcctttactaaaatgtgagctccaaagttcagggtgatctcttttgttcatactatccccagccctaacaatgcctcacacataatggaaattcaggaaatacttggtgaatgaaggaagagaggggtgtccaggccctaagctcatgcartcatttgtaagacagtgatgttcctgtttctttcaggtccggggatcccgagctgtcctgcagctgtaccctgagaactcagagcaggtgagtccctcggctactgggtgtgcmggggagttgggggactcaacaggtaagctgtcctggggaagcgacaaagaatcttatgcagattggcgggaaaaggaggaaacatgcaccctagtgtggcccctgatggcacatttgatgacctgatatcctaagggggtggcatctgcggaggtggggtgggatgccttctcttggcagatgacatggtattacagataaggtgatgcgactgatttccataaccaaataagtaaatgccatttaggaagggtgagagggcaccgacagttctcygttgtgtgatgtataaattaaggaatggcrgagtagkatgtagatgttgaaagataagtgaagagctgttcctgactaataacatgaatgactctggattccaattggtggccatctccctaaacttgagtggggagctgggtccctgcactggaaagtgagaatgaggggagttgctttgttctgtaattctcctgagggaggtgtgggccatgccagattctagcctgtacttttctctacgtggcttacagcgaccttaagttctcccaggcaggatttgtcctggagcagactggcttctgaaggaggggagggaggtgaagctgtctgctcctctcaacctccgctgcctgacccgctgcctttctttcctcagttggagctgatcacaacccaggccacaaaggcaggcttctccggtggcatggtggtagactaccctaacagtgccaaagcaaagaagtgagcgctgggggccggtgtgctgcctgggctgcaggagggagggtagtggcatagccctttcaggccactcagtggtgcagaggagtgctggggtgtgggtcaccagggtccaggcaggcggagggggtgcgggtgggggagctgagggcttgtctccctgtggggctttctccacccaaccctcactttgcactttctcctttcagattctacctctgcttgttttctgggccttcgacctttataccagaggtgagggacactgggtttgcaggcaggcctgtgtcttttgacttccaggcagtggggctcagcctgcagagcctgctgggagaacactggtggggaagcagggcccagccccagagtgcagaccctggagtgctcacatcctctggaatctggaggcagagacctctgctctgcaggtcccagaaaggcgtgtcagttccttctcrtgggactggacctcgtccctgtcggaagggtcaggcctgggtgcctgggcttctggagtggggcagatggtttgagaactctccagggtgacctgagtgcacttyggttcctgcaggggctgagtgaaaatcaggatgaagttgaacccagggagtctgtgttcaccaatgagaggtaaagcaactgctgaagcctrccccggctgcagcgggggctgccacatttgttagacatggactttctctctgccctcacccaagcctctcaggtcacatgcagcagggacaccaaggtgacggtagaaacatcaggtcccatttggactgtgcctgtttggggctaggggtttggggtcctggatgtctgggtgcagccatgcagcctggactccctttgtgagcccacacatgccccttccccttgccacgcctggcaggctgtctccttcttttctgatgctgccctccacctgcatctgggaccctctcccttgggtgctgtggctctcccttccttcctgcatcctcatcttgactctcctgggtcactgctgtcggcacacagacatgctgcacaatttctccttttctagaaaagttccttccttaaccccataacaacaactaaccaccccgttgttgcttcccttcatagcagaactcagacctgcctcttcttcccctcccaccattctctcaatccacttctcaggctgacrattctgtctcatcacaaattgttcttgtcaactccaccaccaatttccatcaagccacatctggtcacttgtgactttttttcatgtccttaatgtgcctgctcggtagggtcaaagacagcagtgcgctccctccttgacgcttccttcacttggccttccacccaccatcgtggtttcctcagccttcctggctgctcctcactccactgctgcttcctcttcgagtgctgggcccagcctggattggatcccttctctacctgtggtgctgtaaatgccagccggaaggtcctaattcccaaatgtgtatcttcagtctcttgccacctggggtttcccaatgccccctcagtgtctatacctggagtttccatgggtagtctctctctgttacccaggctagagtgcagtggtggaatcttagctcactgcagcctcgaactcctgggctcaaatgatcctcctgcctcagcctcccaagtagctgagactacaggtgcatgccaccatgcctggttaatttttaaagtttttggtagagatgaggtcttgccatgttgttcaggctgatcttgaactcctggcctcaagcaatccccctgtctcggcctcccaaagttctgggatgactgatgtgagccaccatgcctggccatcctccattcttttttttttttgagatggagtctcactctttccccccaggctggagtgcggtggcttgatctcggctcactgcaacctctgcctcccaggttccagcgattctcttgcgtcagcctcccgagtagctgggattgcaggcgcccgcccaactaattttttgtgtttttagtagagacagggtttcaccatgttggccaggctgttctcaaactcctgacctcgtgattcgcccgcctcggcctcccaaagtgctgggattacaggtgtgagccactgcgcctggcctcatcctccattctttaccattcttgatcattcctgtctttccctacatttcacatcttgtcagcctgtcattgagccctgctgtccgtccctcagtgtgtatccccgtgctgaccctccctgcttccaacgagcctaatccagcactgcccctagcctggattgctgaacagctgcctgtgttgtctccttgcctttgcagtctttgcctctttcagattattttctgcatagcagcaagactggtctttttctttttttctaaaatgtaagttgtatcttgtcattgctcttttagtgccttcattgcagttgtgctccccgctcatgttgattttccttaacacccttcactgctctaagtcatacacataccagttgacttggttattatttgtatctccagctagagtgaaaacttggtgaggactggtattatatccctgacattaaaaatagtgtcttgttagtaaaaagtgctcagtatttttctgaatgaataattgattataaggtagtgaagagggaggttatatctgaggtccagttgacatgagggaaaggtcttaagacctttaagacatttaagaggaaaaatgagcccaaaatgcatgtgtttggaaggcccacagctgggcacagccatgcatgttcctcacgtccaccataggtttatgctgcctgaccccttgggtctttgctcatttcccttagtttccctagtycattccccatggggagctgggacccttctggatgacctcttctctgaggcgcccatctcgtgctcccagggagcactcccatctcctccctcccaggggaagtacacattgccttatctccatgtgtcttaggatccttcttgtccttacactggtgtcttcaaacgacatgtcctaaaagtaaatgtgggtaagttgaatgacctgagcatccattcctcagctattcaaaaagtaggggtagtgccacctatcttggcagtgtgttgagggtgcccagcacgtaccttgccatccctcgttctgtaggctctcacttccagttcctcagatgaggtacagggcagggaggagcttctcccgttactgtcatctcagtctaaccacattcaggacacttgtttattttaaataaacaggtgaattaagaaaaagttttttaagtctttacctaatcagtctccaggctctctttttggcctgttcctcccttcctcctggccgcctccctcccatgcctctcatgtgcctcctgcagggctgggcccccacttctcttgggacctgtgctttggggcactccccgtcttcacctccttcctttagctccattgatgactttcccccttgctgcttctcccatggctcacctcttgccccctggttcgccactctrccctcactttgtactctttgtagaatcttgagatgactcctcctgtgtccccagccctgctctgcagctgctcctgctttgtgctggctcatcaggctcaggcatccgaatggcagctccttggcttgccctgtctctggtttctacggatggtcacaggggtcttcggggttaccccgccctctttccttcttccctcatacccctcagtccttccttttcagmccctcctttccatccctgtcttcctgcccccaagctgtgggaccctaagctcctgctgtgaactgtcgactgtgctcttgaagtctaggtgatgatgtgtcattgcattggtagaaagcggcctgcttactgctgcttagctgcttcccgaagagggaacagactgctcgctggtgtttaggtctccatgcccggcccagctctctcctcctctgcccacccaacaacctctgtggcccggatggatgttatcaggaaggagggtgtccagagcggggaattgtgttatagggaaggtggagcatttgagagaaggggcatccgaggccaccagactcggaggtaagcttgccatggattcacatgggggccagtcgggcagccccatccatcagctgtccatcagctcatagctgtgtctccgccacaggttcccattaaggatgtcgaggcggggaatggtgaggaagagtcgggcatgggtgctggagaagaaggagcggcacaggcgccagggcaggtgagtgccagcctgggagctggcagggtgggtgggggtggatgactattgccatgaagagcttccctttatttgaagggtccagggctgctttgatctttttttyctgagactgtcctattccttttctgcacagggaagtcagacctgacacccagtacaccggccgcaagcgcaagccccgcttctaagtcaccacgcggttctggaaaggcacttgcctctgcacttttctatattgttcagctgacaaagtagtattttagaaaagttctaaagttataaaaatgttttctgcagtaaaaaaaaagttctctgggccgggcgtggtggctcacacctgtaatcccagcaccttgggaggctgaggtgggaggatcatttgaggccaggagtttgagacctgcctgggcaacataatgaaacttcctttccagggagraaaaaaaaaaaaaaaaaaaaagctctgagagcatcttattttgtttaaaggcaagaaataaaatttccttttgtggagctctggcatctcccagctctgtgattctcaccaaactccagttcctcctggtgggctactgctcgactccccaggcaggaatcagatttaaaacacttagatgaaagcattctttccatttgcaaggaacacagagtcctttaatttagggcttatatataactgtatcataatcacaccaagcaaagttgggaagagggcccacatgaaatgtgttcgtggtgcctgctggccagtccgttttcccttcctgtgaaggccttgccagtccagcggccccagcttgaactgtggcactgagctgcacggtcagctgcctaccagcccagtgcttggatgtcttgggctgatctcttgtcccgtcactagtggttggaaagggaaggtcctgctctggggtagtgtgggactgtccagctggctgtgataggagaggaggtgtaatggttgcttgagccttttggtccatgtgggaagaggggcaagatcctgggcattgcagtacagagctggattaggtgttcagcagcttaagacattagggaatgggtgccggggcccgaggggctgggtgtctgggagtggggtgaggcttggggcctgaggatctaagccctgcagtggggtttcctgcaggtgtcagattccaggccttgagagtggcctctgggcctgttctcagggaataaggcctggatgttttccactgcacggccagagacaggtctgaggaagttgaaggcccagggtggggttgaggctgagttgggatcctcgcctctgagcccttcctcttagtgccacattcattcatcctcaggttctaagactgtgacactgcagatggcaagaagtctagagcagccaggccaggcacaacctgtggtcccagctctgtgggaggctgaggtgggaggccagcttgggcaatagtgagaaccctcctaaggttttcccccaggagacctggggaagaaatctacaacagaggcctggtacagatacaaatgtttattctacataaaaatttcacaaaatgggcagctggttgtaccaagacctttggtgaaggggttggggggaatcgctgttcaagaaggcaacacggacagtggtcacagtcactgggcaggagtaaagccgagggagggtggggcacacggacacggccccatcccctgctgcatgcactcgcatgcatctccctgcctgtccacaagggagagggtcctggggcgggggcacatttcccatgagaagccccaaggtggtgaggaggaggaggtagccctccccggctggctgccgaatactgcatctgggacacgtgacacccacgtggcacatcgatgggaggatggcaagggcaggatgagactgcaggcctgaaatgacatctgacttcccagagcgcaagacaacaggagccaccatcccaaacatgcaacgctggcttgagggactgactgcagcctgctttgcctccctagctgctggggtggctggaaatagggcaccagccagccccttccagagggacacctggggtcagacctagcccaaggggttgctcctggggccggaggaatgtgggaagggaagctgaggcccaggacccgatggactttgcccctaggcaggggagggagcctggagccatggcagcctgagcctccctggcagtgatcagcgactgagactcagagctgggctgtccctcagggccacctctcccctaacctgaaaagcagcaccatgtggccagctggtccccacccctcagggctctgcttgtggggacagctggagaggacagggcaggtcagctggaggcgaggttagggttcccagggaagagcagaacctgggcccaccgagttactgaaggcaaggaagggtggcctgtgtcaccctggcggccctgcctgggtctgctcctcgctgtgcacactgcatcacgccccgctggctgcctccctctgcctcttcccgtacagacgcacactcacagagatcatgcacacgacacggggcggggacggagggcccatggcagagaagggagcatgggggccgggagggagggtgctctgagccagaggcgggggttgggagggcagcccagccaggtggcagcagccagggcctccttggagtggcccacctggagtggagtggcagtttgggtggcttctaggcgaagatgcccccaacagtggaggcgatgacgatgcccaggatcacacagcagatgatgatcatgattttcttctgcatgggaagcgggcaggagaggcctcagacagtgttggcggcaggtggggtgggactatggcaaaggctgaggactggacagtcgggggggatccaagcaggggaaggtgacggcctgggagggggctgtcatggggagctcctgagagaagggagagaggtgggatggggagggatgtggggatggttgggggtccctaatgggtgctggggcatggccttgggcagggctgggctactgacccggcgcgccttgctctggtacttgacggccttcttggtgtcagacacggccctctccacatagtctaccgcgtgttccacattgtactcgatcctgtcaatcatctctccctgcggggccgggggcacccgagctccagagggccccctcctcagggttgggttggggctcggggcaggacttcaggaaagcaccctgaggctagagacaaaaagggggcgtgaggaggttagggtacagcttctcacctgggccaggtaccctgggtggggtgtagagggccaggcaggctccccaaggcagctcccacatttccccgcagagcagcaatcctgggggtggagctggccatgcagtctcagctgagggttggggaccatgcagagaacactgtcagagatgtggcagtgccaggcagaggaaggtgggagcaggagtgggtatgctggagtctggtcctgccctggccatagctcctgaggtggccacaggtgagcctgcccacacccccatcctcaggcatgacagctccatccagctctgtctgctgtctggggtcttcagtctttaagaacttgaagtcaggttcgagaccatcctggccaacatggtgaaaccccatctctactaaaaatacaaaaattagctgggcgtggtggcgagcacctgtagtctcagctactcaggaggctgaggcaggagaactggttgaacctgggaggcagaggttgcagtgaactgaaatcctgccactgcactccagcctgatgacagagtgagactccgtctcaaaaaaagaaaaagaaaaaaaaaaaaatagaaccccctgcccagcccacagcccttttgagccctgtgatctggtcccatgctgcccccagaggccaatctgaccatgacactgccccacaagactcctagggcgtgtctccctctccaagtccatcggttgccttcactggcgtccacgtcaccatggtctgtttctcaccagatggcggcagcggcagcctcctgacggcctccgtacttcctaaccaaggccacatcactcccatacttaacacattccaacctggctgggtgctgtggctcacatctatgatcccagcactttgggaggctgaggtgagaggatcacttgagcccaggagttccgagaccagcctgggcaacacagcaagatcccatcttttgctaaaacaaaacaaacaacccaaaccccctccaatctagaagagaccgcaaattccccagcacactgcctgccaaggccccgtccacctcgtctccagcttcatctcagctccgaccactccttgtgccccagcagcaaggacctcctttttctgttcctgaaataagtctgggtcttgctgggcttgggaccttagtgttgctggggccagctcttcatctccgctgcgaagtcttcacagctggctccttttcccccttttttggcatcagctcaaatgtcccctcctgagaggccttccttgaccactcactccaacaaaggcagccgccccatcgtggtcacggtgttactctgtgtaactttggaaccatagtggtggtggcaccacctttgagcttgtcagagaggcaccttcctggaccttcacctcagctgccagtctctgggacggggacctggaaacttacaagtcctccaggtgactcattcaagtttgagccccactggagaaccttcgatttgttcttaggcaactcttttgcccaacagccattcactccaggaagcaggtccctgagctgtcctggtcactgctatgccttcagtctctggggaaatgcgtggcccacagtggccccatgaggaaacagtagtaggggaatgagagacggcggggtatagagggtggggccatgcagggcctggggtccttgaagctcaagcagagccatgcagaggacagggaccttcgggtcggcagggccctggcggcagtttcaacagcgggtgattggttacctgagaacttggtccctccccggcagggcagcgtgtcgggcagaaagggcgaggttagtgcagccctgggtgctggtgtgggctggagtggagggcaggggggcccggcactcacctggctctccacgagcatggccatgtccatgaacatgtcgtgtagctcacggatgctgttctccagcttgatgatctcactgtgccgcgtctcaatctcgctcagagcctgcttcgagatgctggagtccatgatgatctgggggtgggagcagggggctgggacccagaggcttgctgaggggcagggcagagggccgagggggagggcgtttggggtgggcagagctgctccggaagggggcctgaggcttcctcccaagccgcagccttccccgccttgctacctggctctgccacatgctagctgttacctaatttctctgcaagccaatctcctacctgtaacgtggggctagtgacactttccacctgtgctggccacagagcgagtgctcagtgacagtccttatcaccagcattttgcagagccgaagttgactgccccgtggacccaagcctggaactgcctttctcccgtcccttcccccacattgaatgtgactgctcctcccctctctcctggaactcacagccccaagcctgcctcgaacacctgtgtgccacatccttcagggagcacccctgcccggcttcacgtgaacacagaaatggccaaatgtcctccaggagaggaaaagggcccacggataagaggaggagccgctggccgccggcgaaagtgagtccaactgggaggcatcaggagacaggggtcttgagtccacctttgccgctgacatttatgtgacctcagcctggtgttttcccctctctgggactcttccttccctaaaacctgccttacaaggggtctgtgtccaaatactgtccagacccagcactaggggtcatggacgtagggaacatggtgagggggtcatggcaggagggatggggcctacactcaccccagaggcaaagatggcggggttcccactctccagcatgtcctccagctcctcactggtcgtggtcctgccggctgcaagcgagtggggtcacactgagcccagccctcttcggggagttcagcagcagcattgggccccgccccctccgtcccaggcccgggctccccccagccccgagctcagcggcagcctcaggccccgcccccccggcccttaacacagcagccgcctcaggcccccgcccctccagccccaaactcagcagctgcctcgggccacccgcctcgggcccctaactaagcagcagccttgagccacgcactcagcagcagactcgggccccgcccctccaggctccaggccccgccccaggccccacccccagctcactgatctccagctgcctctggatgcggcctttgcagcgctcgcggtagtcggactgcgtggcgttgtactccg

SEQ ID NO: 94254 - DNA, 24356 bp, Homo sapiens
ggcggtgctgtctcaactttgtcctctggccagggtggtgggggactcacttgtgtaacgcaggacaaatgaagggcacctctgtttgtccctttgttaggagggatagatgctgctgacccagatttactagtgttaagatgattattttacataaaatataatattcaatatagtgaagggaggtcaaaggccctattcccactcttagccacctgaattaacttattaagtggagcatattaaagaggtggtgggggtggatggtgctatgttaggagtggtggttggttttaagaggaaagacagaaaaactaaaaggagctggccccagtaccaccaaggcaaagccaaatttggcttcaattaagagctccacaggaaaattatcaacacaatgcccaggtgcagaagatccttgttttgacacggggtttaagtcgggatgttttgttcaattgtcactgcttccttggcttcccaagagagcagctgagcccagactcaagctggctgcagtgttccatcaggcttatggcttttgtgcttgaggcctccctgccgcttcatgggtcaggtgtgatattcaatcactgccttctatgtagtctggcctgtcccacctttatcttgcctgggtgaggatatgaagaagggaacatatgacattaccactgttgactgagtaggaaagtatataggaagcgggatgacagggaggaccactggatcagccgctgcagttccagacttcaatcaacattttaattaccaagtctatatttagcaagacaatgtgggagagataaagaggaaggaaggggtaggtggggaggggttctcaaaggagctgacccattttctgcattggctgcagagccttgcagtcctggccaggagttcttggccttgtgcctttcaraagtgccgacaggcatcaaggaggtacttacgcagctacagctcagtggcagctgcaaaccccatctacgaaacatgtcatcaggactgtcctttaatagtcttcctcctctctgcagctgcgggaaagaggactggccaagaatttcaggtggggtcagtgtgactgcagggtcaccgcaacagctttggctgtggcgttgaggacggtggtgggaagccgagcagcagggagcatggcagggatgtctctggggaccctctggatgggcgggatgttggggccctccagtgtgtccaggatccctggaaggaagatggaaggtgagcgaggatcagatgggcccagcccaccagccatcatatctagcttcttgctctaggcagctgctttcccattctcccccacccagaccttcctgccacttaccctctaccactttgtggtaggcaaaatgcagatagagcaggaagagcatgtgtagggcagccagggtgccacagaggagcagccgctgtgtggggcccacggtccgagacaccaacactgctacctaggrccatgagaatacagctcaaagggcctggctccaaagtgaggartggggacaagacacccccacccagggcagaaccatctttgggctcttccctcccatttagggctctttgtgagatggacagctccaggctgtcttccccaactccctgggaggacagcccacccctggaagcctcttgcccagcttaccatgcgcagtgtggacagtccacccaccaacagccagaagaggtagaagagggcgtggaggtggatattataggtgatgaacaggacaatgcaatgcccaaagaggccatagccctgggaaggaggatggtggagaggaaaatcattcaggttgggctgctttctggcccctcatggggaccctgggaaacacatggtccattggcctactcctcccattccaggctttggggccccaggacagatgccgaccaaggcctggctactctttttaacatcactcttgcccaccacacctggctccttaccagcagtgccaacatytgcagcatggtgatctgggcgttgcacaggtaggcaaggaagtaaatgaaggatgagactcccagccagtagccgaagcaggtgccaatggctgtgcccatcagggtgccctcccgctgtggggtgaaggctctatttagtcctaggaggcctctgatctcagcctcacctagggccttccgcaggggctgttcctgtctcactccaccattgtatcctcaggcagctttcaacctagtgcagccacccccccaaagttgtctgtcctgcttacgataatagtgtcagacgtcttcatyccatggagtaggatagcaaccagagtgaagaccagcatgagaggtccatagagttcacctgcaattttctgtcaatataccaattcattcaggctggagggtacaacagctcatctgtttatggcttcccaggatttgcctggtggtcccaccctctgccctggtgcttcccccggctctccagacatgccaccctctattcacctgggggaagttgaccatcttgatagggatcatggactccaggagcctgggagaggagaggagagattaaagcaaaggcagcacaaggccatgaggttctggagggcaaggcctgaattttattcatctctaactccagggaatggggcctggcctagaagacatgttggatgacacggtagaacagggtagtaaagacagatagggaatgaggaaatcatttccttgcccctaaagttacttccaggaaggacaaccctctgaaacttagctgactgaaacagcagctatatggagaactcagccctactgggccttgaaggagggcccgaccatgtatccgtctgccccctccccttgaaaagacaggcaggctgggcgcggtggctcacgcctgtaatcccagcactttgggaggccgaggcaggcagatcacaaggtcaggagtttgaggccagcctggccaatatggtgaaaccctgtctctacgaaaaatacaaaaaattagctgggcatggtggcgggcgcctgtagtcccagctactcaggaggctgaggcaggagaattgcctgaacccgggaagcggaggttgcagtgaaccgagatcgcgccactgcactccagcctgggtgacagagtgcgactccatctcaaaacaaaacaaaacaaagacatgacaagacaggcagacctcagcagagagtacccagaattcagggttataatgaggaagccctgggaaaagtctagccggctagatggaaagtttagaatgaaaggtgttactgagggaatagtaaaaacgcctcctcttcctgcttatctgtgcctccaggcactttcgagtattttcttgaaaaatatatgtgaagtggtatgaaaatttagtcacttccctcttctctcaagtggctagctcctaatcatacctgggattttagctaggttttacttcctctgggaaacttgtcctgtcccacccaccaacctgctttggctcacatatccctcctgtgtgccccatcatagaatgagtactgtactgtaactgcactcaagagcaaggctcccatctatcttcaccactgaaccagatacgattagtttagcgtctggcacagagcaaatgcttaataaatacctgctgagtggtcctgggtatttgattagcattgattaaaggatgaacaaaaaaaccaagccaggattaaatctagttcttgaaaagtcactcaaaaactatgccctgatattttgattctgagactgttctggtgctgggaataaaaagataaacaagacagagcctgcttttgagatgctgttggtctctggaaggaagattccaggaataagaaaggatagcagtggtgaagtgctgtctattagaggcaagcgcagagttcttttttttttttttttgagatggagtctcactttgttgctcaggctgaagtgcagtggcacgatctcggctcactgcaagctccgcctccgcctcccaggttcatgccattctcctgcctcagcctcccgagtagctgggactacgggcacccgcctgtctaattttttttgcatttttagtagagacagggtttcaccgtgttagccaggatggtctcgatctcctgaccttgtgatccgcccgcctcggcctcccaaagtgctgggattccaggcgtgagccaccatgcccggctggcaagcacagagttctataggaacaccaggagagaacaaactggggatgggattgaggaatgtggaacagaggaagtgacatctgaggtaggttttgagggaagatgagtagtcagttagatggaaaagaagaggaagatggtgtgctattattacttgtttcartgacaggtgcagtgatgagaggtgatggggtcatgaagacggggagcccatcagagcccagggcttgaaatctgactgtagtgtgcatgaaggtctaggtgttaggagggaagcttcttcaagagaaggctcctcacctgcttcgcacctgagcaggctccacatcaaaktagggtctgaggatgtcgatgttggcgtacaagctgaaggccctggaggcttgtcttttcccagcctgccacatctgaagtaaggaagatgggcataggtattgtggtactgttggttctagatcctgttgcctattttccgtttgatttctacatggttctaactggacaacctggggcgaacatcaccaacaccaattccagaacacgggacatacctaggtctacttttctacctgcagaggattcaatcttgcttacctgatctgccacctgccggctcagctgtcccttaaagcccttcatgcccaggaactctccatcctcctcttcagcagcagctgcatcagctgcatcagcgtctacttcttcctcgcgcaggcgctgatgcagctcacccatatcctcgaagctagagcctgaggtatcatccatgttctccatgtcaatcacagctgagcctccgccctgtgaagacaatggctcctagagtgcaggacttttctgttccatccattaagtcctctgctcatcccagggtttagggctttgttcttccactgctgaggatacggcttggaatcactacagatcatgccactccattccccctcatatgctctcagaacgcctggtttctagctttggctatcttttctagcctgggaaacctactagtcttccattcatgtctttctcctatgttacctatcaaagactaaaaggctgaaaaagtgcccatttccttctttcctaagccccaaacaaaactatacacatagtatgttttcagcgaatgccagtgaatcccacccaaccccactccatgccttaccccgaccaacctcctaacttgttccaagaataccttcttcctaatgcctcgggcgggccctgaaacccgagatcctcaggctggagtagtagtctggccctttcaggtcaatgttaatcccactgactttagtgtgcacgaagacccaaagaagagagttttgtaaatggagcggacttccaggcccagagggggartccccaagacacttctggacatcgccggccctccggctgctggcagctggtgccttggggccattacctggatgttttcttcgaaccctccccattccgggccagctccatttcgggcgccgcccgccggcgccrctgtagttgccatgtcccttgagggctcccgtcgctgaaacccgcgctagccccgcgcgcggagtgggcaagatgtgggcctccggaaggtagacgtccagggtcgaggagaggtgggatcggccggaacacaaaaaggagaagcccggatgtttggacaaaagcaacttccggaagctggggacgtggacgggggcsgggaaaaatctcgcgatatttaagattccaggaggcggtgcgttgccacggagacggagcagggctactaggacgcacgcgcgagatagaacctctagtctcrtggagagattraagatggcggcttctcaggcggtggaggaaatgcggagccgcgtggttctgggggagtttggggttcgcaatgtaagccttgtggccttgagctcgggcgggaggaatgagagcggaacagggatgggtcttgggattggcgtggggatagctgtgggctcactgtcccttcgtggacaaattcgtccctttgctctaggtccatactactgactttcccggtaactattccggttatgatgatgcctgggaccaggaccgcttcgagaaggtaagtggggccggagttgtctggggagggttatgaaggccagaccytgtggtctgagcagcctgtgtctgtctcagaagctgctcttgggggtcgctccgtttgtaagtttgttgagcaatgtgctagacgctccgtttacaggccaaattagacacggtttctacycagttctgcaaagatgttcagtcttgttgaggaatggtgtgtataaacagtgaatctagtgtaatatggtgaaggtggttgatagcgatgaagacggcagggttggggtggggagcattacgctgagaccaggaagaggggcggagaggtacttaacatttcaagwggagggtacatctcaattgagccttgaatggtaagtaaaaaagaacaggagttaaattatgaagggtttgtttcaagtcagtgaagttcaggatatacaggttttgtgtgtatttagtcttttgtattgtttcacttagcttaaaataagggttaaaattgcatttaaatagattactgaatgttaccgtttaggcaactgacctttgcgtgcagcttataaacatgatctgtaaatcagtgcttgggaaaattttacttttttaacctgttgatacaaggaataaagtatgaacaatgaaaaaggttaatgcttgaaaaaaaattatggcttgtgtgaagtgtgctccgggcatgtccaagtagttctggcatgagtggtaggcaaggttgaagtgtgtcttgggcactgttgatgatagggagattgaatagttcttaagcagacatgatgagatttgcaaccttggtggctgggagggaatgagtttgaggaggatcatatggagcaggcagatctgttgtaagggaagctgaggttgaagacatgaactaagactgatggtagaaatagagcaaaggtagaatagaaggtaaatttatgattgctttggtaaaggctgtgggggtagcataaaatgactttttggcttgggaactgctttgatgcattgtggtatcatttactgagaggagaaatgggtctggggaacgggaatgatgatgcattgttttctgcatgtggagaaatctagcaggctagaagactgcatgcttgaaatgagatcagaagtgagataacattttgggagttgtcagaacagatagttgctaaaactgttagtacagttaaggtgacctgggagagagacaagaacctggcaaatttagagatgggtggaagtcgatcatcagagaaggaagaagagtggagctcagagctcagaaaccaggggaatagttcaaaaaaggaggagatttttttctttgcttttcatgaggcactcttatgtcccaggctggagtgcagtggcgcgatcttggctcactgcaacctccgcctcccgggttcaagcagttctgcctcagcctcccgagtagctgggactacagtcatgcgccactatgcccagctaattttttgtatttttggtagagacggggtttcaccatgctggccaggctggtctcaaactcctgaccttgtgatctgcccgtctcagcctcccagagtgctgggattacaggtgtgagtgactgtgccgggccaggagggggttttttaatcaatgccaagcataacagaagtctagtaagaggactgagtagtgtcaacaaaactaagcactatggtagtttctgttcttcagtagaatagcttctgtggatggtttggttggaagccatattgcatagggttttaatgaatggacgacaaaaatggagacttttcatgaaacttaaaacactgggcgagatagaatatttaataagagacatttgggcaaagggaggtttttggatgagaggataatacttgagggaattatctaagggggaggtatgaagagatattacacagagagcagatttcacttaaatgttttttcctgtccctctagaatttccgtgtggatgtagtacacatggatgaaaactcactggagtttgacatggtgggaattgacgcagccattgccaatgcttttcgacgaattctgctagctgaggtattggcaggcatggtgacaaggctggagttgctttgggaactgcactgacacctcacttggagaattaagtgtctcaagctgtccttccctccttaattttcctggaattttgctgagcattttaccttctcattctttgtaaatttctcattaaacattctaggaagagagatagctccctmcctctggaggttggggttacggggataggtagggggtctgttgggtttttgcagataagtggttatttttccttgggcaggtgccaactatggctgtggagaaggtcctggtgtacaataatacatccattgttcaggatgagattcttgctcaccgtctggggctcattcccattcatgctgatccccgtctttttgagtatcggaaccaaggtgagaaaatgaaattttgggagaagtggactatctgggttcaaatcctggttgactgtgatgttgggtaagttacttatctttgtacatcagtgtcttycatctgtgagaacacttgccttgtctcccaagtttgccataattaaatgggaaacacgtaaagcattcagcatagtgctggcactcagacgtttactagttcttaggagctccctccatttgtgcaggagatgaagaaggcacagagatagatactctacagtttcgtctccaggtcagatgcactcggaacccccatgctgctaaagattcctctgaccccaacgaactgtacgtgaaccacaaaggtgagtagtggtagggtgaggaagaggccccacctgtgggtagctgctagttttagggactgagatcttctgacatgtttttcctccagtgtataccaggcatatgacatggatccccctggggaaccaggctgatctctttccagagggcactatccgaccagtgcatgatgatatcctcatcgctcagctgcggcctggccaagaaattgacctgctcatgcactgtgtcaagggcattggtgagaaccctgtgtgccttcctgggaagggggatagttcggttgcagtggggcaagctgactagggaactcagctgagacattcccggcaggtagaaagccaagagggttgtgcttttgctgttagtagcttaggaggagtattcttcctaaccctagaagggtttcctataggcacgttccctcttyctctccaggcaaagatcatgccaagttttcaccagtggcaacagccagttacaggctcctgccagacatcaccctgcttgagcccgtggaaggggaggcagctgaggagttgagcaggtgcttctcacctggtgttattgaggtgcaggaagtccaaggtatggtatttgggatgctgttcaagttaggacctaaattatattttctttcaaggtgacagaaataaaaaccctgggctcctaaaagtataacctggtttgctaccaagtggcaaattagaaaaaggaataaaaaaacatggtttgttctcattaggtaaaaaggtggccagagttgccaacccccggctggataccttcagcagagaaatcttccggaatgagaagctaaagaaggttgtgaggcttgcccgggttcgagatcattatatctgtgagtatgaagtggtgagatgagtgggcagtgctctttggtgctgcagyttccttccagtctagatgtgaagtttatgagtaagttttacaggcaagccctgcctagactaaagtgtctctttggtccccagtctctgttgagtcaacgggggtgttgccaccagatgtgctggtgagtgaagccatcaaagtactgatggggaagtgccggcgcttcttggatgaactagatgcggttcagatggactgagcttggatgcttctgaggcaagctgaagcyttgggttctgactgacccaccctacaggactgctgaacagagagcccagtgtgactagggatcctgagttttytgggacaattccagctttaatcaatacattttgttaaatgtgccataaaatgagactttttacgcctttataaggccttagatgtaaataaactcacccaaacaaaaaaactttttgagactacttttgagtttgttttttgagacagtctcactgtgttgcccaggctggagtgcagtggtgcaatctcagctcactgcagcttcctcctgggttcaagcaattctcaggaggctgaggcaagagtagctgatgctacaggcatgcaccaccacacctagctatatgtctaattttttgtatttttagtagagacagggtttcaccatgttggtcaggctggtgtcaaactcctgacctcaagtgatacgcctgccttggggcctcccaaagtgttgggattacaggtgtgagccaccgcgaaaaacagggggcctcacttcagaactggtttagcatttaccaattaagaacatcagatgtgcactccagcccgggtaacagtgagaccctgtttcaaaaacaacagaaagaacacctcctgagaattggcaaattaaggtggtttctgggagcacagccaaaccctagaaaaacattcaagctagagtgaatgtgccacttcacctatctcctggtttaccagggaagttcatgttgctattgacagctccaacaaagaacagtagcaattcctgtgggccaggcccagcagccacacacgaaagacactgtgagaatggtatgggctgcctagtctgggtatgtcaggaatagaaatccttttctaactggcacaccatttcagaaagcttgaaagaccagaatcatcagtcacatttcttcctgttttagtcccgggtgctcatgaagtaaccctggagtatgtcactggttttaagactaggttgaaaaaggcagatgggtccctttytgtacgaaactgagatttttactgacatgcagatgtgctttagagttaatgtttctacaaaaagtttctataaacaatagaaaatttctagcatgaagtcacaggatgttaaaaatattacaatgcaataaatacaactacatcctccacagccccaaccagacaggaataggcagctatcaggtttggagggaaacactcttgagatcgccttcacgatccacagaaacccagagcaccacacaggaagagggagcaacacaagactcccaacttctgcttccccagctttgcttcttctcaatctgaccctgcctgtggcccgcaccagctaaaaactgtagcttcagtccacttcggctctcggggaaaccctcttgtcagtggactggatggacaacaggtctgtttttgtgcagagcacatggacacactggtttctgtatggattaactctgccttacggccagtaataacctcagggccaggtcccgtatccatgtcctctctttacagggcctttcagtgacctctagaatggactcacagtacaggttgtgatgtgaaggcatgtattcttttggaaatggcctttgagaaaagtaaccagggacctgaaagaccatgagattgtggaaggcacctggacttagtcctaggagaagaccagcggctttgctagctgctcatcacagatgtagcctagttggtctgtattatccttggatgacaacggtgtcatgtgacactatctagggtactgtggctcttgtgcctgagtggaccttgaggctggggaggccagactgaggggtcattcatggaagggcaagatgtgtgaactctaaaggggatgttagcactaaagactkcccagccctggtccttggaggtactatacttgatactgtgccaagtttagcagtagcctgtaccatggatcccatcaggtgaccagattcttgcccaaagcaaagttgagagaactgaccaagttctcttcagcacttagcacctaacccagacatgccccttagggagtggggaaagtttcctgccagcccagcagcaaaagggctcagtgggagttggagtggtccaagagaaactctggcacaagtagttgagggctgtgctcttgctgcgagccttgctagtcgcagggttgggcacagcacccttagttaccattctgtacaggtatgtggctgcacgggggtgggagggcttgtgggagaagggctgctctgctctagcttttcttggaaaagccaaatctccaagtagaatgggaactatctgggacatctagacagaatagtttaagccctaactccctttcttgatactttagtataattacttytggtcctgcacagggcctgttctctccagctccagacctggatctctttccaggctgacagtggtggaaagtgaggtggcagtgcaagaagggcctagagatcggctacaaagggaaagaagagatgacaagaaaggccgaggaaggatgcccaaaagcttgattcagggttcaaagatggtggccaggccacccccatcattgtccagcacctccgtctccagcattggctttgtttttttgaaaagtgagggaagattcttaatgtgaacttcttttcggaactgctctcccaagggtttctgtggaaaacaaatgagaaagaattaatgctgggccctcagtagtagttaaaagattctcttggcccggcgcagtggctcgcgcctgtaatcccaacacttttgggaggccaaggcgggtggatcacctgaggtcaggagttcaagaccagcctgaccgacatggagaaaccccgtctctactaaaaatacaaaaagtagccagacgtggtggtgcatgcctgtaatcccagctacttgggaggctgaggcaggagaatcgtttgaacctgggaggcggaggttgtggtgagctgagatcgtaccactgcactccagcctgggcaacaagagtgaaaccccatctcaaaaaaaaaaaaaaaaaaatctcaccataatggtcaataactacagctggtttatggtttgcccatacacatgatttaagaagggggttgggagcactattgaaggtgcatgacctaccccaatgcaaccagcaatgaggcgtttgaattggtcctttcggcgcttgtcagccactttctgcagggaggggtttaaaagcttgcagtcaaactggtccagtgagtccttctgtatttcagggatttgctccattacagctcttatctccaggtacctggggcgctgatatcagcagggataaacttactggatgtaggtttggatattgccaccctccccatttcctgccacacccatttctcagagattgcaccagcaatttggcaggtgcctgaatttaggataaggcccaagagactaggagcagactgagtgatgaagctgcagccatccttcccccatgccttccccactcaccagtgcctcrtatatctggaaggccagatggaccagggaagccatgcacccgtcgtgctgcccgtgcatctgtaagcctttcagcacactggtgaaaagccacgtaactgcatctgcgagcagtgtccctgacagcacctggggagacaactgtgctttagggccacagggggcctctctcaaggcctcagcaccccagttcttctgaatgatttagtcagtctgcatgacccaaaccttccatgaggggcagggaaaaggggtgaataaccatacttgtttgaggagaggccagcagagctgtgaggttgtcctctggcaggacagagtatctttccaggccagggaattgaaggctgtaattaatagcgctgtacaaacatcctgaacaggaaaagatgaagagttacaatggaaaaagaagcacagttttctctgatgattattacacatcaggagccggagggttttttttttttcctccccccctctaaagatgggtttgttttgttgcccaggctggtcctgaactcctgggctcaagctattctcccatctaagcctcccgaatagctgggactacaggtgtgtgccaccatgcctggcttaggagctggagttttaaatagctaagcaggaaaaataaaaggagtttacttcctctatttttgtgtattgccagtcaaaaagaaaaaatcaaaatgtgagaaaacctgtatgtgtaggatggagacaaagctcaggcctggcttggggaggctaaacaccagggatctgcatcagtgtgcctactatgtgttttcctgagagctcctgcctatgctggtatgggagacaccatggcattgcaccttttccctcggttttttctggggcctttggaaccaggaacttatgtaacaaaggagtattacaaaaaactcttgatagcaccatagagcaagaaaagtaaaaggtgactccccacctgggcaaggagtaaaggtatcacctgctccttctacccacctcatgcttcatcagacatttgcccaggtctgtaagctctgccatagctgagggggtgacctctgtggccatcatttcttcatctgttatcagagagtagaatgttaagctccatcctttcagaacagagaagaatatcttgttctgacagaagcgcaaaaaacaaagcaaagctgagtgttctaggctaagtggtggctaagtagtactaggagccctcccacctccacataatgcccatgcccatggctgatcttctagagatgcactcaagctgtacatgagggaaatgggagcttctaggcagaaacacaaaatgctgcaaatactgaagttactttgttgttggacaaatatttgagcaccagacactgatttagttactggggataaaaggtataggacaataggtcccttccctgatgggagtttacattctaacatgggagataggtaagaaaggaatacataaataaaaacataatgttgggtagtgacaactgctatgaagaagaataaagcagaggaatacagagtagctggggttgccatttttgataggttggtcatggacgatctctgggaagaggtgacattggaataaagcaagagaaaagatcacatatatggttgggaggaaatcatctgagacagaggaaacagcaagtgcaaaggcttggaggtgggagtatgatggaggcacacagcaagagggctggtccagagatgataactacatgtarggtgtcttctcctcaccagactgcaaggaaactgacctggttcagaaggaacagtatttaggaggctaagagcagaactccaaggtctcacaggctcacttaccgtctccatctgctgggggagcactactgtggtcagcacccttctttgaaacacagcaaaccgctaaagcaagaaagcagggttactaggtgaagggtgggtatatactaccacaacagccacctcaggcccactgatcccaacctgtctctggccaggtgaggaaggaggaagatgggggtaccgtccaaggcacaagaattagcttcaccaatagaaatagaggcattctgatgaccgaactgttttggtccttcaagttcaactagctgagagaaaattacagaattctctgagagtgagtgactaggaaaggatgcttgatacatccctggtctactttgaatctcaaacaaacaaaatgacacagtaaaaataaaaagaaaattaacagcctccatgtccaagaatttaaaacatttccctattttgacaaaactaggaagttattcctaatgaatccaaattccttctgctatttttgtttccccatattcagcttgcaattcataaagtatccttaggttgacttaaggactgccttgcttctatctagttatttcttttggatctgtcagtgttgctacaaacatgaactttttttttgagacggagtttcactcttttgccaggctggagtgcagtggcgtgatttcggctcactgcagcctccgcctcccgggttcaagcgattctcctacctcagcctcctgagtagctgggactacaggcctgcgcgccactacgcccagctaatttttgtattattagtagagacagggtttcaccatgttggccaggatggtcttgatcttttgacctcgcaatccaccatgcccgccgcaaacatgaatcctttgcattagtcaggccttcatggagttggctgagcgaccagctcttcttccaggaaaatcctctatagccccagtttcgacatgccacttactgattaggtccatgacttctcgggttaacatcctcaccagttgctcctccagcatctcttgagactctgggttttcatctgcagcctcatcttctccactgcagaaaaccagggggccaagttccacaggagtgcagaaaaggaaggacaaggaaagcagcgaccctaatcagactcwctctgaccactttcttctcctttgggtcttcgttttatgcaaaagttgggaatggacagcagtgatccactgaaggacattattactagtgactstgtccagttggatagacattacagaattaaaataagtgagtaaggtaacagtagcccctatgaaggctggatctcagagtctgcctgctggtaacagcctgtccagacaagccatgtatcacctaggctgagaatgactacaacctactgctcttctaccctgggacagcagaatccctgcccgcttccttttcccaccccaaacctggctgccagttcatccaccaagaagagtgggtaggtatcccttaccacagcaggctcctttggttgataacttgccatttctgagaaagcctctgggaaaacacaaaggaaataaatgctagaattggggaaaggattggaacacataatatctaaagtcaagtccacttcatgattaaaattagccaaggatgattctaggcatcaatgacaacttctgtagactccacaccacaaggttaaaaaaaacatctatggtttctgtaacctatcccacatccctgatgaaggtggtatctcaaacacctctttgcttggaaagaattaacaacatttttagaattcctgggtctctagacatacctgttctccacccagctggtccccctgcttaattctagagtaaggataacagacccagcattcctggcaagggtctgtgagcaagcattcctctttttacctctcctcagttaacaggaggttaggagcagaatctgcaactgaagctgtcttgtggcaattaaatcagtttagttctttgggggctgctcgatcctacagcaaggatagtcagctggggtagaagctctgcccagccagtctggcagggctagtagacaacacttctaggagctcctgacttgcaaagctcagaaatggccagaggccttaatagtactctttgcttcctgttcctgacttatctcttaccatatggaggtaggtgaaaagaggtccgaggatgggggataccagggcttcatagtgctctgggggacagaagagcaccagaggctttacaaagacmcgtgctgcaacaagttaagaaattttagtgcataggcacacatctctcacctgccaggtggtgggttgcacccctgggcagaatcaatccctaaaggatttgccagatgtcaaaaatatcctgtgttaacagtgaaaaaatcttaaagttcttttcctaaaatcctaaatggcactgatattgaattccattatactcttagtttarctgcatttccgtcaggctgcacattatggtcactggcccaaaaagtaggaataaaaaaataggaaggaggacatccttgtaacaaactctccttcaccattctccttataatttcaggtaagaaagatttgctggctgcggtggctcacacctgtaatcccagcactttgggaggccaaggcgagtggatcacgrggtcaagagagcgagaccatcctggctaacatggtgaaaccccgtctctactaaaaaaaaaaaaaaaaaaaaaaaaaattagtcgggcatgggggcgagcgcctgtagtcccagctactcgagaagctaaggcaagagaatggtgtgaacctgggaggcgaagcttgcagtgagccgagatcacgccactgcactccagcctgggcaacagagcaagactccgtctcaaaaaaaaaaaaaaagaaaagaaagaaagagattcaactattaataagggtctgaatgagaatgaagtgttaaaactgctgcttctggctgggtgtggtggctcaggcctgtaattctagcactttggaggctgaggcaggagaattacttgagccaggagtttgagaccaccctggggaacataatacagacccatctctacaaataataataaaaactagctgggtgtggtggtgcgcatctgtggtccagtccaggctcttcaggaagctgaggtgggaggatcacttgagcctgcactgagctttgatggcaccactgcattcctgcctgggtaacactgagaccctgtctcaaaaaaaaaaaaaaaaaagtgcttctaaaaatacagaaaagggataaaagttttatctttcacagctgggcatggtggctcacacctgtaaccccagcactttgggaggctgaggcaggcggattacttgaggtcaggagtttgagaccagcctggccaacatggcgaaaacctgtctctactaaaaatacaaaaaaattagctgggcgtagtagcatgcgcctgtaatcccagctacttgggaggctgaggcacatgaatcacttgaacccaggaggtggaagttgcagtaagacaagatcatgccactgcactccagcctgggcaatagagcaaaactctgtctcaaaaaataggaataaaaatcagctgggcgtgatggtgcacacctgtaatcacagctagttaggaggctgaggcacaagaatagcttgaacctgagaggcagaagctgtgagccgagatcataccactgcactccagcctgtgcaacagagtgagcaagactgtctcaaaaaaaaaaaaaagttttatctgtaataattccgagaagggggaaggtaaaaatttacccctaaggaaaagtttatggccatctggactgccttcatgttttccctgcaatctgccagtgtttttaatgacatgatacacttagatacataatctcatctcttccttccagttctgcctcttccctctggttgctgtgacctgttttgtttctctctctrattttctgaccttttgggttatgtagagacttttgaaaggatatgaagcatgggtctgagtcggtagtcaggaatattgttcaagttgacaaaggctgagctgagaagctgggtagcaaggtcctccacagtatagaagtcttgctgcatggaagggcctgccttccctaggatatgaaaactgtaaaggggaaaaaaagagcattgaaaatgacaaatccaacatctgttactgccagccctgtcccatgaatttcatttctagcctacaataaggtttttcagccagaagagcagttgtatttacttaagagaacttatagatacagcatctttttaaagacagatgttggtggccgagatcagcagtagctttcattactatttaatgtggacttacaatggacgatctcattagcttggctgattagtgtagtggttagtgaggccaaagcccatgagggccagttacctccccaacccacaaccagtatccagccacccgactcctatgagaagtatgccgcaagcagtgtagggtctaagcaatccccaccacttttagcttcgacttgggtttcatcattttatacactagaaacacagacaagttgggcatgaagcaggctgggattgtgaggctcatatgacaattacaaaaaaagcaaatgcaggaaagcaggctttcatttctatttaacactagaatgataagtttcctatcaaactcttgcctcgccttacctgtacactagatgaaaagtccaacccatggacattcctatacaatacatatcgaggaagaaaatatggagaggcagcattggttccttaccagttttcatagagggtagagaagaaacgctgcattctttccaagacggttttgaagacaggagagtcattgagttccaagagaggttgaggtaatcctacagggaaatacgggtcaagaacatgatgctccactgtcaggagtctcaattggccaacactctacagcaggaagctgttgttcaggggtgaagatgtgtgcatgtctggtgctgtactgcaaagcagttggctacgtgatttgctgcactcttttggtaggagaaggtgaaagctacttaaggacccaggactttagacccgggtactcttttatctgcttttttttttcccccagatggaacctgtaccaaaaaaagtgacaactcaaaagtatttttccataaagctctggggatgctcccacaattaagttatgaaaccccttttttaagcaaaatcttacacaaaacactaagatgtgtagcagctaaaaatgaaacccacttaccttagtattaaaaactgccttaaaatatctatatttttaagtgtaatcagaggttttacatttcgagtcctatagtcagaagctatctgtgggaactgtttgtccattctagtatttctggttggccacttatttctatagcaggagttcctgacttaacttgaataatggcatgggggtgtgtggtaagcaacacctactttttatattaatagctatacatttcttggaatttctacttttactggtgtctgcaacataacccttaaatggaatggtgtcaaaggaaaagattcaggactatctaggctgaaacagacagacatgagttctggaaaggcaaattaacatccttcctttggctaacttcacagctgaggaatgccattggattgcttgaccacagcygggctcagacacaggttatagctgatgacaaagacaaactatgggggctgtgatggtgagccagcctgaagcttctgagatgggaacaaggtttagacaactgatgcctctagctctaacttcatcccacattcccagactagctccctgtgctccagccacatgattcaaccatctctatgttctggacataccaaggcctttttctcttgcctcagatcttatacctgccattctgtttgtccagaatgcccagcatttcctcatgcccctaacctagctagttcgtactcatccttcaagtccccattgggagtcagccttctgacttccctctgagactgggttaggtctcccgataaacactcagagccctgccactttccttcacagcaaataccacaattatgactgcacagttattttcatgyttattttcaatgggaaaatgaattaaagcagtatcctaacaaggtcacaactggaaggccaggcgtggtggctcatgcctataatcctggcactttgggaggccaaggcaggcagagcacttgaggtcatgagttcgagaccagcctagccaacatggtgaaaccctgtctctactaaaaatacaaaaaattagccgggtgtgatggtgcatgcctgtagtcccagcaggctgtgggagaatcacttgaacctggaaggcagaggttgcagtgagctgagattgcaccactgtacaccagcctgggtgacagagtgagactctctcaagaaaacaaaacaaaacaaaaaaggtaacaattgggaaatggcttaaaatctattcctttaaaaactttgatacctatctacacacacacacacacacacacacacacacacacacacacacacacacacgaggaggcaggaaagtatacaaatatccttcaggttaaaggccatgatttatttataattgaatggctgtaacacccaccacaacctactggctaaattgaagaaggggttaacggggaaaaaaaataaattgccttcgattttctctgtatgctaagataatgaagtaaatacacttgttcatatagagcttataggaactccacattctgcatttctgaacaaatagatggtcaaggcagtgcaagacaagatggaagaagcacaagataggctgaagctgctcaaggaacccataagaacgcctgtaatcactaggattctagtgctttaaaggccatggtgggaggactgcttgatgataagagttcaagaccagcctgggcaacatagcaagactctgtctcaacaaaaaaattttaaagttcgtctggcgttgtgatctgcctgtggtccaactactcgggaggctgaggcaggaagactgcttgagtccaagagtttgagcctacagtgagctatggttgcaccagtgcactctagcctgggtgacagagactatgactcttaaaaaacaacaaaaaaaggggacatccattagggataagataaaccttaggagaaaaaaggttacatttcttacctaatatagcagatttttccrcgtcaagcatatccagagccttggtgaaaggctctgccattttggctagcatttctggtgcatataatgtattgtgggttctgaaagaaacaagaatgctattgagcttttccatctgatgcagaaggaaagagtgggttttgcttgtaatccagtgatactacagtttcacacagatctgcccatcaactcctggcaggggaaagaaaagaaggtataaatatctgaatgctcgctggaggagggaacagacttgtatagatataattatcttagtatacaatacctaagataaattaacatgagaactaaaccccaagacacaggacagtatcagagtccaaagctagaaagcaaaattcttttaaatctgaggtggtcccaggagttttttgaccaccagtgatacggaatgaaatgtgtgcaacactgtggatttacaggtaggaacacagaggaggtggtaatttgccccatttttcaatgttttgtcttaattccaagagcatggaccttgcaacagctgtttggacctgatagaggaacacaattcccaacacatgctgtcccccaccaaaatgacctacctgagcaattataggctttgagtaaggagcaaggactgtgaacttgatatacccgctgtccacagcactcttacctactcacagaaatgaccccactgaacaaactgatggctacacgtttaagatgcaaactgaaaacatcttttagaccatgtttaaacctccatagtttgttctttttgttcttaagaagtcattctaggctgggctcggtggctcacgcctataatcccagtactttgggaggccgaggctggcgaattacctgaggtcaggagttcaagaccagcctggccaacatagggaaaccctgtctctactaaaaatataaaaattagatgggtgtggtggtgcatgcgtgtaatcccagttacttgggaggctaaggcagaattgcttgaacttgcgaggcagaggttgtggtgagccgagatcataccactgcactccagcctgggcaacagagtgagactccatctcaaaaaaaccccccaaaggccaggcgcagtggctcatgcctgtaatcccagcactttgggaggctgaggtgggtggatcacgaggtcatgagatcgagactatcctggctaacacagtgaaaccctgtctctactaaaaatacaaaaaattagccggacgtggtggtgggtgcctgtggtcccagctactcgggaggctgagcttgcagtgagccaagactgcgccactgcactccagcctgggcaacagagcgagactctgtctcaaaaaacaacaacaacaacaaaaccccaaaaaacagaagtgtttctatggctgggcccagtggctcacgcttgtaatcccagcactttgggaggccgaggtgggtggatcatctgaggtcaggagttcaagaccagcctggccaacatggtaaaacccagtctctactaaaaatataaaaattag

SEQ ID NO: 94255 - DNA, 56366 bp, Homo sapiens
gaaatacaaaaaatcagccgggcctggtggcgggcgcctgtagtcccagctacttgggaggttgaggcaggagaatcgcttgaacctgggaggcagaggttgcagtgagccgggatcacaccactgcactccagcctaggtgacagagcgagcctccgtctcaaaaaaaaaaaaaaaaaaaaagaaagaaaatgagctccagtttttctgtcatttcctagttttttatttttttgcttataaaataggatttcattttgctgacctagacaccctagttccttactgtaagattaatcaaaaacactcatattggaaaatagaaatgttataggtaggggtatcccttaccacttgctgatacttgtttacattttcttgaagtgtgttaagcagaaaactgaagatcctttccatgttctgggttaatgtttgctggatgtcccttcttctttgagggggaagtgtctgaaaagtcactacatcctctgccagtcgcaaaaggataaacatcaccaattctgtctgtgtttcctacaccaatagaaataagctagttaaaaactaaaatatcttttcattttatgtatatccaaaggctattttctgttgccaaaaaaaaaaacccacaaacaaaatcaaacaacaaaccctgaagtttgttccaaggaaaagtataccaaactgatatagctgtgtttcataccccttgtttggaaagagtgtccaattctattagcatgtcaggccaatgctgtggccactctcgcttgatcatttccactacaattcgagacagagcatctttaatatggttctcctcttccaaaatgttcaatgttccctgaaaaagaacaagagatattaagagatatgcaagactggattccagacttccagaaaaaagctgggctgtagagttgtaaaaaatttatcagcaggcctacttttaaaccaaacagaacaaatgaacctgttcttcagcctgagtcacttgtcctgcattcttgctaatcactcttccgcttaaagcttaagtgagggttgcatcacctaaaaggctgtcatatcgagagctaggatgacatcattattctttacaaaatgaaaagattctcatattgattgtttcagtttgcagaaggccagggaggaagagtatagaaataaggagtatagtgagtagctggtaaaatggaagggtatgaaggggcaaatgaatattttaccaatagttctaacactagaagacgcagaagtattagaagatcccatctctcatgtctgttatttaaaaaaaaccaagaaagaaaaaaggctacaattttgaacatgtttaaagtcatattctgttttgtgtttaaagagacagtcatccagtcatcacacctgtaatctcagcattttggaaagccaaggtgggaggattgcttgaggccaggggtttgagaccagactagcctgggaaacacagtgagaccctgtctctctaaaaaccaaaaacaaaattagctgggcatggtaccacatgcctataatcccagctacttgggaggctaaggcgagaagatcacttgagcccaggagttcgaggctgcagtgagctatgatcatgctaatgcaatccagccggagcaacagagactctgtctcaaaaaaaaaaaaaagtcatattctaatacttgaaacaaattcattctgcatacttaaaattctgcatgtttttcatcattagtatcacatagtagttgtttggaataaaagaaaatagtgtttcaatctaatttagatctaagaatcttattgatttgttgaaaatatttaatcccctctgccctgtctttataatttaaaaaatagaagtcaatacataagcatgattaattaaacctagtaagagacatatgctgaattatgctttctgcttttgttttgttttgtttttgagatagggtcttgctctgttgcacaggctggagtgccatggcaccatcacagctcactgcagcctggacctcctgggctcagaaaatcctcccacctcagcctcctgagtagctgggccacaggcatgcgccaccacgctcagctaatttttgcatttttggtagagatggggtctcactgcattgcccaagctgctctcgaattcttagatgcaggtgatcctcttaccttggcttcccaaagcgctagaattacaggtgtgagtcactgtgcctggcctaaattatgatttcttgtgctgtctgacctatttagaagcagtgaatttttacacaaactccctattgaagaagtcacgctttgcctaaactaccttggaaacatgtctcccaaccacccattccttacatttgcaatcagctccatgacactgttcttcagatacaccttctccaatcgagacatgccgttccaccgaaacctgaccaccaaaatgcataaagtcaatagaaccactttagaagtcttgtctttacaagagaatagcatggatttctacatttgattacactggagatttcattaagaaattatacttttgattttgtacctgtcaatgaatgggcaaaaatgatctacatttaaccaaaatactaacacaaaaattcttgggaaaaggttttatatatgcagtggtccattaactggaatccgcacaagatttgtaccacacgtcagctttgcctcatgattttattgatgggccaaaagtgaatatacatctaggtcaactgcaacaatgtacttgcttttcagaaaatgcagttttgacatcagtcattttctgtgctggcttacaaaacaattctggaaaaactatggctaagtcttaaaggctacctcttctgataggtgttgagggtaggacaatcaagttaggatgggttttcagttattctcatacaatcctgctttggatgtaccacccagagaaggcacacaaactcagaaagacagagagaaaaaagaaagccacagtgcctaatcagagattcattgacctatacattgcattactctaaaaaggcttcgagggctaatgacatatagtcagagctcagtaagtattggctaaatggcaggtaatatttgttgaatgggtaatatgtaccacacactttacatggatgaagaaactgaagaaaagaaaggttaaatcttgaatgagagctcctgtgaggttctgataacatctaggggatcattcctctcttcttggagattgctcttctctactcacctaaacagcatctctataggttatataagatataaagatctgttctctcagacttcagtggtaatgtccaagagctccttacttgacaacgtgttccaggatctgaaggccaaaatgtctgacgatggcaacttgtgttttctcagccaacctcaagccacaggggacacagataggacacttttctttaaactcctcacaaaactgaaagaagaaaagttagtgtttcctttcgagggctgagagaatagggactaaaagaatttcatcttaagaaactccaaccagggccgggtgcggtggctcacacctgtcccagcactctgggaggctgagatgggtggactacttgagtctaggagtctgagactagcctaggcaacatggcgaaaccccatctctattaaatatatatatatatatatatattttttttttttttttgagacggagtctcactctgtcgcccaggctggaatgcaatggcatgatctcggctcactgcaacctctgcttcccaggttcaagcagttctcctgcctcagcctcctgagcccatgtagctgggactacaagtgcacgccaccacacccagctaatttttgtatttttagtagaaacaaggtttcatcatgttgaccaggctggtcttgaactcctgacctcaggtgacccacctgccttggcctcccaaagtgctgggattacaggcgtgagccactgtgcccggcccactaaaaatatttttttaaattagccgggcatggtggcaggtgcctgtaatcccagctactcaggaggctgaagtggtaggagaatcacttgagctcgagaaatcaaggctgaagtgagccgagatctcaccactgcacgccagcctggacaaccagagtgagaccctactcaaaaagaaactccaacctaagctatatgtttaaagttgcaaaacctagatcaatattatgtggatctccaagcacagttgctttaaaaatatatatttaatataaaaataaaaatataaaatatataaaagttacacatatataacatttcctccaagtggtgttcactctattttatgtgtatatattatatatatattatgaataaagaactgataaacattccttccagcgtgatggttccagattttttccatgctacggccaacagtagccctactagtgttggaaaaaaatggacacaaaggaataagaaattatttgttagagacatccccctgacgtacataggggtgaaataacaatttctagggtttcttttaaaaaccttcgaggcagggagagaggataggcggtggaaaaagtaaatgcggtaaaatctttgattgctgaatttaggtgacaggaacatgcagaatcactgtcgtattctctccacttttgtgtctattttaaatattaataataaaaaccaaactaatggaacccaattgtttctgattccaaaccctgtggcagacatctacatattgtaacatttcctccaagtggtggtcactctcttttttgaagttaacatcactttaaaaatgtacagcacaagtattttctcctaaatggccatttctcacagcccacacacgttgttttatgggcaagtaagcttgaattgtattaacacccccaaactgcaacataagtcagtcccaagagcagagcattcgggtctcacgcaaactactttcaggaaaccaaagtgcccttgttaaaatgcaaagtaagtggtagaagttatctttgcgcaaaatagcctaaaaatattacactcaaaaacatgggagaagtaggggtgcgagaatttccccggaaaatgtccaagacacaaacgaaagttagcgagatgttaaagcatataagcataagggtaccagaggggctggagctcggtcagggccaggggagtgggccagcaggaaaacgtttagtgcaggagagaccataaagaacgaagctggtgttgggggcgggatctacacgtgcgcctcgggaaggcgaggggatgtcgggcttggggaatgaaaatgggcgagggtcatgttgcggacaagagtgcacagaagcgaggaaagggggaggagagggctgtgggaagctgcggcgagatgagaagcagcatagggaccggagtgtcccaggcaaaggacaggagcggcgagtagagaaggcggcgatttgggagaggcgcggagggccgcgaggggaaggtcccggggagttgggaaaggaggtccaggggccgcgtgggcgggagactaccccagttacaggcggcgccggagctgctggggctgggagagggtgtcgggaccggcccaggacgccaggaccccagctaccttgagggcttccagccggtagcgctgggtggagttggggtccatcatgaccgtcaccgctttcaccagctgctcgcacagcgcgtttacttgatccatcgccatgcctagcgccacgcgccgagagcgcacaccactgcagtcccgggaccacgaggcacgacagctccctcggcgagaccacccgttggtaccgggccgcggcgggcggcgggggtgggaagctggaggaggagcgttagcagcaactcgcgctgggaagaagccggcgctgcgcacgcgcccggcccgccactgcgcacgcgcccgcggaagtggcggctcccgtgtgcaggttgagcctaggtgggcggggcgggaggcggaagggccgcggtgcgcagccgcgtcaacggcccttcgcagcgggcgcgctgtcagacctcagtctggcggctgcattgctgggcgcgccgctctcgtctgatccctgctggggacggttgcccgggcaggatcctttacgatcccttctcggtttctccgtcgtcacagggaataaatctcgctcgaaactcactggaccgctcctagaaaggcgaaaagatattcaggagcccttccattttccttccagtaggcaccgaacccagcattttcggcaaccgctgctggcagttttgccaggtgtttgttaccttggtaagaaaatttagaaccgttcgctgtcactgtgttcagactttctatgttgccttggctattggttttataatgtagcagtgactgggccaaggttgcgtgaaatataaatcatgctaacagggataaggccctggtactgtcttctaagatttttcttgtagaaaaaagtatgtttttccctgtagttgttaaacctctctcttggaattactttcctggatgtattattacctggtgggcactaaacttgttttgtgcggattggggtaactcgagatgtttaaagggaataattgcaatcagtgaaggtttgtgcagttttgataattggccaagtgctatgtataaggtttcaaagtagtgtaatccttatccaaaagcatggcttgggcagaaagtcttcttcattttccatctttataaagctcttggccgggcgcggtggctcacgcctgtaatcccagcactttgggaggcggaggcgggcggatcacctgaggtcaggagttcgagaccagcctcaccaacatggtgaaaccccgtttctactaaacatacaaaaattatgtttgcatttttagtatttttatacaggcgtggcggtgcgcgcctgtaatcccagctactcgggaggctgaggtgggagaatcgcttgaacccgggaggcggaggttcagtgagccgagatcgcgcctttgcactccagcctgggcgacagagcgaaactccgtctcaaaaataaataaataaagctcttgctttctccagtaaatacataaacggaaaacctcaacagctttattatctgttaaagtctgcatgtctgtttttgtgattgtgtgcttagtaaattgtgtgctgaacataaatcactgcttcctattcttgctccacttctggtatttggatctaatatggtgcttagcctgtgtttttttgtgttacaatactatttgttggctcagtctgttccagtactactgaaaagccacttcaaagtagagggacttctggcatgttatagttttaacttgtaaatgtttaaagtatcacattctgcctgttttaggcgtggtcgattggaatttataaggaattaatgctttgactgctctgattttaattatttttctttccactcaccttcctgctttgcagttgtaagacgttttttttttcaaggtgaatgttagtttttgaaaaactttttttagaatacagttgggtgctcactcaactgtataacctgtgtttctcgtatttaaatcatggattgctggtgtttcgattgtcttatttaggtcttggctcccaaactgctgcatattggaattacctggagagcttttaaaaatccccggcctggcgcggtggcacacgcctgtaatcccagcactttgggaggccgaggcgggcggatcacgaggtcaggagatcgagaccatcctggctaacacggtgaaaccccgtctctactaaaaatacaaaaaattagccgggcggggtggcacgcgcctgtagtcccagctaatggggatgaggcagaggaatcacttgaaaccgggagatggaggttgcagtgagctgagatctcaccactgcacttcagcctgggtgacagacggagactctgtctaggaaaaaaaaaaatccccatgctaggccgagcgcgatggctcacgcctgtaatcccagcactttgggaggccgaggtgggtggatcgcctaaggtcaggagttagagactagcctggccaacatggtgaaacccagtctctactcgaaatacaaaaattagccgggcgtggtggcgtgcgcctgtaatcccagctactcaggaggctgaggcaggagaatcgcttgaacccgggaggcgtaggttgcagtgagccgagactgtgccattgcactccagcctgcgcaacgagaacgaaactctaactcaaaaacaacaacaacaacaaaaaactcatgcccaggtcatacccataccaattaagttagtatatatagttgtggaagtcaaatatcagtagtatttaaagcagcctggcggggggacaagagcgagactttgtctcaaaaaaaaaaaagtgtcatggtcatgaaaaacaaggaacaaccgaggaaatgccacagattggggggcagtaaagtatgtagttaataatatgccaatgttcatttttaaattttgrtaattgtgttaagtaagatgttaacatcaggaaactgggagtaggagaactctaccatttttgcgattttctgtaagtctaaaagtatttcagagtaaaaggttgacatttttcatgaatgctatgatgttatatattattttctccttctcttttctctgaatttatacttgagatttgtctgtcaactgattccgtattggttctcttcccctggtgatgtgcattttaatttccatttccccatgactaatgatggtgagcctatttttatgtgccaattggctatgtttgtattttgtggttagttcttttaaggataagtatttttaaagcttttaatacctattgccttcataaaattgtactaatttatccttatgccagcagtacaggttgagtatctgtgatattgtgatatatgtatgttagtttttgtccacggttcctagctcataactcccctagctttcgttataatgttggagctcttgaagcaagcctcagaaaacagaatctctctctggccttctgccctcctttcacctgcccaaagcaggactctaatcttcccctgcctttctgattatgggtcataagactttcatttcagaagagttcctaccccataccctggagaaaggaatgctacccagagaggccaggaagaatctggacaggccttgctgggtttccccagtctattagtattagatcatatcttttttgtccagtcacatttctacacggatgtcagtcatgcctatccaatgaagtttccataaaaggcccaagaggagagggttcgaagagctgctggataggagcaaaaggaagttcctggagagtggtgttcccagggagggcatgccttgccatgtgtatctcttcatctgtatatcctttataataaactagtaaatttgattacctgagttctgtgagccactctggcaaattaactgaacccaaagaggggctcatgagattcccaatttatatccagtcagttagaagcacaggtaaaacaacctgtggcttgtgattggcatcagaagtagggggcagtcttgtgggactgagccatcaacctgtgagatctgacgctttctccaggtagataatgtcagactcgaattggaggatacccacttggtgtctgctgcagaattgattgcttgtttgttggtggggagaaatcctcacacatttggtcacagaagtctaccttattgattgttgttgagtgaaagaatctttttttttttttttwaaatttatttttttattgataattcttgggtgtttctcacagagggggatttggcagggtcatgggacaatagtggagggaaggtcagcagataaacaagtgaacaaaggtctctggttttcctaggcagaggaccctgcggccttccgcagtgtttgtgtccctgattacttgagatcagggattggtgatgactcttaacgagcatgctgccttcaagcatctgtttaacaaagcacatcttacaccgcccttaatccatttaaccctgagtggacacagcacatgtttcagagagcacagggttgggggtaaggtcacagatcaacaggatcccaaggcagaggaatttttcttagtgcagaacaaaatgaaaagtctcccatgtctacttctttctacacagacacggcaaccatccgatttctcaatcttttccccacctttcccgcctttctattccacaaagccgccattgtcatcatggcccgttctcaatgagctgttgggcacacctcccagacggggtggtggccgggcagaggggctcctcacttcccagtaggggcggccgggcagaggcgcccctcacctcscggacggggcggctggccgggcggggggctgaccccccaacctccctcccggacggggcggctggccgggcagaggggctcctcacttcccagtaggggcggccgggcagaggygcccctcacctcccggacggggcggctggccgggcaggggggctgacccccccacctccctcccggactgggcggctggccgggcggggggccgacacccccacctccctcccggacggggcggctggccgggcggggggccgacccccccacctccctcccggactgggcggctggccgggcagaggggctcctcacttcccagtaggggcggccgggcagaggcgcccctcacctcccagacggggcggctggccgggcggagggctgacccccccacctccctcccggacggcacggctggccaggcggggggctgacccccccacctccctcccggatggggcggctggccgggcggggggctgacccccccccacctccctcccggacggggtggctgccgggcggagacgctcctcacttcccagatggggtggctgccgggcggagaggctcctcacttctcagacggggcagctgccgggcggaggggctcctcacttctcagacggggtggttgccaggcagagggtctcctcacttctcagacggggcagccgggcagagacgctcctcacctcccagacggggtctcggcagggcagaggcgctcctcacatcccagatggggcggcggggcagaggcgctccccacatctcagacgatgggcgggcgggcagagacgctcctcacttcctagatgtgatggcggctgggaagaggcgctcctcacttcctagatgggatggcggccgggcggagaygctcctcactttccagactgggcagccaggcagaggggctcctcacatcccagacgatgggcggccaggcagagacactcctcacttcccagacggggtggcggccgggcagaggctgcaatctcggcactttgggaggccaaggcaggcggctgctccttgccctcgggcccgcggggcccgtccgctcctccagccgctgcctcccgggcggcgctcgccggcgcggcggcaaagactgagacagctctgctgcccrctgaactccatcctcccggcggtcgggcggcggcggctgcggtcggtcgcggcagcggctccgcttcatatctgcagctggggcccgcgggcgtcagcgccgcgactgtcccggctccgcactgccccgggccgcagcgcagccgcgccaaccaccacccgcggccaccatggccggacgggctccctaagccaccgaccccagcccgcggcgccttcgagccttctagggcctccggcgccgcgacctcctctcaagatcgagtgaaagaatcttaaaaactgttttttccactcagggtatccctaatctgaaatttgaaatcttccaaaatccaaaaaattttttgcaccaacacagcattcaaaggaaatgtttattagagcattgtaggtttaggatttttggattacggatgcttaactggtgattataatgcaaatattgcaaaatttgaaaaaaatgcaaaatctcaagcactttggatcccagccatttcagataagggatactcaacctgtatatttaaatgcctatttcattcttgttagtttccatgctcccatgctcatggtaactcatcagtgaaagaatggaattacagttttccctggcattttggattaggtgtttttctaactgtccataaaatgttgtgttacagaaaaatggctactggacaggatcgagtggttgctctcgtggacatggactgtttttttgttcaagtggagyagcggcaaaatcctcatttgaggaataaaccttgtgcagttgtacagtacaaatcatggaagggtggtgggtatgtatcattgttwttgtcacaactattcaatggtaacacagtggcactgtggcaggtcctttgttgttgtggtggtggtggtggtggtgacagggcctttctctgttgtcccatccagagcgcagtggcaccatcagctcacagcagctttgacctgggctcaagtgatcatccctcttcagtctcccaaatagttagaactacaggagcgccccaccatgccaagctgattttattttttggggggtgggtagagatggggattggttgggggggcagggctcactatattgcccaagcaggtcttgaactcccggcctcaagcagtccttctgccttggcctcccaaagtacaggaattgccagcatgagctgctgtgcctggccctatttttgagatttctgaactgctttgttttggattgaatgatggcatctgtggtcaaaaagtttctaatatgtttatagattacttgtgttaaatgttasttgtttttgcttgtgatcatataatatgttttctgtttccttttttttctaaccttagaataattgcagtgagttatgaagctcgtgcatttggagtcactagaagtatgtgggcagatgatgctaagaagttatgtccagatcttctactggcacaagttcgtgagtcccgtgggaaagctaacctcaccaagtaagaaaaaaacattatttaaggagacataaaggagtcgaaaataatactccatgaggctaggaactggtgttttgaatttgttccatgtaaataacaccggaaaaaattctttttggttagccatcttgtctctgtgaaatgaaaaacagattttaatattgtgttttggggacagttcaaaaccattataccatataagagttgctgcctttgatatctattcagttccttaattgttcaaaattggttgttaaattcagacttaataccaattcccatgttctccatccaaaaatctaaagtatttgaaaaattgactgtgaaactgagaatttttccaggaaaggctgagtcaaactgacattgtagtacaatatcaggaattagttgctataattgaacaatatcaagggagatttctctgtttttagattaagctatctctccgcaaatattagaagtttcaccttggaatgggggatatgaatcagcatagctaagtcagaggtaggcacaaaccccagcctttaatcctaacagctaatatgtattaaacatattatcacatgccaggcacagtgttaagctctctataggcaatatctctattaaatctgacattgttataaggtaggtactaatattactcccccttcacagataaggaatcaagttcagagaagttaaataatttaagttaggctggggatggtggctcatgcctgtaatcctagcatttagggaggctgaggcgggcagatcacttgagtccaggacaccagcctgggcaacatagggaccagcctgggcaacatggggaaaccccatctctaacagaaaatacaaaaattagccaggcatggtggcacacacttgcagtcccggctactcaggaagctgagttgagaggattgcttgagcctgggaggcagaggttgcagtgggcccagatcacaccactgcactccggtctgggtgacagagtgagaccctgtctcaagaaagagaaaagttcagacagctaagtgaaagactgaggattcacatctgttttttaagattctagtatctatgttctcaaggtacactatactatgtgttgtggtataggaatcatgctttgacttaggacctgacatacttctgaattctaattctaattctatgaattagaagtctaaaggtagagtggcatacagacccacattggaattattgctagaaaagaagatagacttgactgaagattaagttttccaaatactcttaaaaataccttgcagtgatttgctcaagaggctgtgaggaagcactgaaatagagtattgttttagaaaaactcaaactatggttttcctctcctctcacaccacaagaacaatcaacacagaagacatctgtgaccaaaggtgtggaagtatttccccacacaccaatcagcagacaccagctgcatgtcctcgcactcaattccaacactgtctacctggagatggcatcagattccacatgttgagggctcaataccacaagaacaccccctccttcctttccatcacaagtccaggcctttagaacgtctgaacagctggctttaagttggggttcctgcaaccccctctttggatttgattaatttgctgaagcgactcacagaactcaggagaacacttacttatgtttattataagggatattacgaaggatacagataggttgggcatggtggctcacgcctgtaatcctagcactttgggaggctgagacaggaggattgcttgagctcagaagtttgagaccagcctgggcaacatagtaagacctcgtctctaccaaaattaaaacaaaaacaaaaacaaaaaaatttagctagacatggtgttgtgcagctctagttccagctactcaggaagctgaggtgggagggtcgcttgagcccaggagattgtggttccagagagtcatgatcaaaccactgcatgcagcctgggcaacagtgagatcctgtcaaaaagaagatgaagatgaagagatatatagagcaaggcatgtgagaaggggtgcggagctttcatgccctccctgggtgagccaccctccaggaatctctactattacagctatttggaacctctccggaccctgtcctcttgggtttttagggaggctccgttatgtactcatgactgattaaaccattggctatgggtaatcaacttgacctgcagtatctctcttcctctcccctccccagaagttgagggggtggggccaaaagtcccaaccctctaattatgccgtggtctttttggtgacctgccctatcctgaagctattagttaacattagcatacaaaaagacaaaacttgggtgattccaaggatttttggagttgtatgccaggaaactgggatgaagaccgaatatatatttcacaatattataagtatccttttctggctgtgtgtatgagtatattgctctttcttttcyttttttttttttttttgtgggtgggggacggagtttcactcttgttgcccaggctagggtgcaatggtgcaatctcggctcaccacaacctccatctcttggattcaagtgattctcctgcctcagcctcccgagtagctgggattacagtcatgtgccaccgtgctggctaattttatatttttagtagaaatggggtttctccatgttggtcaggctggtctcgaactcctgacctcaggtgatccacccacctctgcctcccaaagtgctgggattacaggtgtgaactgctgcgcccgatcttgctctttattttctttgaggcctatcctcttcctagttcaaataatgatttaaaaaaaaaaaaagtcaagtatttctctaattctctaatttgagagtgttttagaacaataattatattagtttttatgggtgtcatggtgaagaggtaccgatgttttcatttttatggtaaatataaagtcaataggaacaaagaactggacactacaaagcaggtccaagccaaaggaaagcaaatatctgtatattggccggatgtggtggctcacgccggtaatcccagcacttggggaggccgaggtgggtggatcacctgaggtcaggaattcgagatcagcctggccaacatggtgaaaccctgtctctactaaaaatacaaaaaaattcaccaggcgtggtggcaggcgcctgtaatcccagctacttgggaggctgaggcaggagaattgcttgaacccgggaggtggaggttgcagtgaggcgagatgccactattgcactccagcctgggagacaagagcgagacttcatctcgaaaaacaagaaaaaaaagaaaatatctgtatattgtcgtagaaaactaggtatagagccagaagagctgcttattaaagtttgaatagaagacatacgatgagattggtatgtataccctgaggaaggttgtctgcctgcccagacacatcaccacattctaggtgcttatcttcaacttgatcatttgaatattagtatatccgtaaatggttggttaaggcatgtgtgtgtatgtggtgatgaccagttcacatgttaaccaaactcaccgttgactgaagtataaaatccatatgccagtttgttaatttatggtgagaaatactatcctggggaagaccatatactctggttcactgatcagtgcagtgttgcatgtaaattaccctttttttgaagacaaaattagaagcagaagatttcttggtggatatatgaaaataaaaggaataggtgatcatagtaatacacaaatttgaggcatttctttattttttagagagttccttgtcatatagacgtgttcatagtctgaatgctttctgccttggtagttctggcattgtgctaaaaaygtttgcctccgtgattcttccttttccatgcttctattattgaccatctgcctgccgattgaccctttcagttactattgtctagtctctgttaagccacatgtctcttgattacgtgtattattgttcattatggcagggtgggagtggagcagacaatctcaaggttgcctctgtttaytgcctgcatgaatgatccttatacttcttaggtaccgggaagccagtgttgaagtgatggagataatgtctcgttttgctgtgattgaacrtgccagcattgatgaggcttacgtagatctgmccagtgctgtayaagagagactacaaaagctacaaggtcagcctatctcggcagacttgttgccaagcacttacattgaaggkttgccccaaggccctacaacggcagaagagactgttcagaaaggtacttccatagcatcatactgcttctgcttcctgcctttggaacctgctttgcttggtcatgctgattctccttggaataattgaaaggaaacttaaactacagcctgaatgaatcacaaggactcacatggaaggatatacaaattttcttatctttccaggtatatggctgttgagaagctgtgaaatctgtatgaaagtaaatttctctttagatataactagggcaggttagtgttatcaatagaaggcagagacctggcgcggtgattcacgcttctaatcccagcactttgggaggccgaggtgggtggatcatgaggtcaggagttcaagaccaacctggccagcatggtgaaaccccatctctactaaaaatacaaaaattagctgggcatggtggcgcgtgcctgtaatcccagctacttgggaggctgaggcaggagatttgcttgaaccaggacccaggaggtggagattgaggtgagccgagatctcgccactgcactccagcctaggctacagagggagactccgtctcaaaaaacaaaaaaatcaatagaaggctgactgagcactttgtcattggtagcttaatttatattattataacttagtgtcttggtttcttcatatataagaagggtgagctttttaaaggggggcctcaggtatagggagttgagtgattcaaaatttctaatcacttcttagcacattattacatatgggctgcacaaggcccctctcattgtattttgctacttttaccctttatagtgattttcccactccctctgtgccgcacctaccctcttgtacccacagatacatttgatatatcttagatgtctgtctttccttccttccttctttccttccttcctcccttcctttcttttctttctttccctttctttctttctttcttttttctttctttccttttcatttcatttcatttcatttctttattttgagatggagcgtcactctgtcgccctggctggagtgcagtggcatgatctcagctcgctgcaacctccgcctccagggttcaagcagttctcctgccccagcctcccaagtagctgggattacaggcatgtatccactacacgctgctaatttttgtatttttagtagagatggggtttcaccatgttggccaggcaggtctggaactcctgacctcaaatgatccacctgccttggcctcccaaagtgctggcattacaggtgtaagccactgtacctggcctatatctttataagttactcagtattgctttgtctatgtgctttttaattacaagatgattttgtgctattatagatctcattctttttctttttttttttttgagacggagtctcactctttcgcccaggccggactgcagtggcgctatctcggctcactgcaagctccgcctcccgggttcacgccattctcctgcctcagcctcctgagtagctgggattacgggcgcccgccaccgcgcccggctaatttttttgtatttttagtagagacagggtttcaccgtgttagccaagatggtctcgatctcctgaccttgtgatccgcccgcctcggcctcccaaagtgctgggattacaggtgtgagccaccgtgcccggccttcattctttttcttaattttccttcagtaatgaccttagagatgtgtccatgtggctgtatttatttgtaattgatggcttcgatggctgttacttgcagcgtaatccatgatatggatccaccatggttacagaccattttccctagtgacaaattcattggttgcttctaatgtcctgctctaacagtttacattccccctagcagtacataaaagttcctgtttcccccatattctcaacaacaactggtatcatctaatgtttaaaaatatttgccaatataatgtttgtttgttttgctttaatttacatttctctgatcactaattgagattgaagatctcttcatacacttgtaagccagctgagtttctgcttctgtgatttacttatttataatctttgcccatttttccatggaaaaatggtaaaattatttattttttgatttgcaagagttccttgtatatcctatcctaattattagttccttgtcttttttttttttttgagatggaagtctcactatgttgcccaggctggagtgcagtggctatcagtcgctattcacaggtgtgtaattatggctcactgcagccttgaactcctgggctcaaacaatcctcccacctcagcctccagagtagctagaactacaagtatgtgccatcatgcctggctaatttttaaattttttgtagagacagggtctcactatgttgcccaggcttttatatatttttttcattttctacttgattattgatgtgttgggaaatgataaatgggtttttttaatgaattcatttttatttactttatctaaaaaaaattgtgatataatctgtatgaagtgttttaataacatgtacttgaaggttaatttttttttcttagatttgaatagaattaggacaataaaaacttgcttttgtggctgggtgcggtggctcacacctgtaatccaagcactttgggaggccgaggtgggtggatcatgaggtcaggagttcaagaccagcctggccaagatggtgaaacttcgtctttaccgaaaatacaaaaaaactagctgggcatggtagcatgtgcctgtaatcccagctattcgggaggctgaagcagaaaattccttaaacccggaaggaggaggatgcagtgagctgagatcgtaccactgcactccagcctcggcaacagagcaagactccatcttaaaaaaaaaaaaacaaaaaacttgcttttgtgataatgttagattatgatagtcctagattccaggtctaagaatttgcataagaatgagggttttttttttgttttggtttttgtttttctttgagacagagccactctgtcacccaggctggagtgcagtggcgcaatctcggctcattgtaacctctgccagaatgaggtcttttttttaattgaatattatgaaagtggaattcagttgtatccccccagagcaaataattctgcatgtttcatgttttggctgggtgtggtggctcacacctgtaatcccagcactttgggaggccaaggcaggtgaatcacctgaggtcaggagttcaagaccagtctggccaacatggygaaaccccatctctactaaaaatacaaaaattagccgggcgcagtggcaggtgcctgtaatcccagctacttgggaggctgagrcaggagaatcrcttgagtccaggaggcggagggtgcagtgagccgagattgcgccactgyactccagcctgggtggcgacagagcaagactctgtctcaaaaaaaaaaaagaaaaaaaaaaaaaagatgtaacatgtaaactttgcttttgctgctgaacaattgcataaaatgcctttaatgtgttgtgcagaagagtagtagtaaaactgcccagggaagcttgtgacttaaggaattattttattttctgatcctgataatgcaaagtatgtcaagctagaggctgcagatcctttagttctttggacaaaatataatggacaataaagatgtgccacttatagaggaagcaaaatcatggtacataagcttttgatatttgatattttattattctgggaccagagtcagaaatttaattatcataataagaaaggtgttctttggtcttacctttctgtaccacatcttattacataactttctttttttttagtttccatatgcaacactgatttttttggtgtcacccaggctggaatgcagttgtgagatcttggcacactgcagcctccacctccagggttcaagtgatcctcatgcctcaacctcctgagtagctgggattataggcatatgccaccatgctggctaagttttgtatttttagtagagacggggtttcgccatgttggtcaggctggtctcaaactcctggcatcaagttatccatctgccttggcctcccaaagtgctgggattacaggcatgagccaccgcacccagcctgattttttttttttttttaaatatttggaattggttttataatgccttgaatttgtggctctttaaagtttatttgagaattacatactcttaaaaatttgttgaaagctatagacccttgctggcctccgaaaaatttgtatctatacataagacaattttgcatgcagttttcaggagattcacaaaccctctgaaatccacatacctcagaattagaactagtcttacacattatattggtttttgctgcagagcattgttgaagcattctattatctctggctgaagatggtatataccttccttggtagttgaatgttaactcagatggacgtgttcctctttcttctacacttacttttcttacctatgtacatttttttattaaaaatgcccatgtttatagagaggtctatttctgtatgtcttgtgtctgttgcattagtgtgtccaacttaaatattaagctcccagatgcagtgccagcatcttattatatgtaatgttcagaacagtgcaatgtctaggaaatatttcatatcatattcctgaatctttgatgtgtgcaaccacaaaaacctgataacagaaattagctgatctaagtggatataaccttccagaaatcatttttcatggatacaatatatttcaaatctaagaaaagaggcgaggtatttgtaataccttgatactgagctttccatcaacttttccatcttgcctcctataagagctagcaatcatgctcagccctcctgcatttgcagctttgtatcttcttttttttttttttttttggagagggagtctctttctcgctctgtcgcccaggctggagtgcagtggtgcaatctcggctcactgcaatctccacctcccgggttcacgccattctcctgcctcagcctcccgagtagctgggactactgttggccgccaccacgcccggctaatttttttgtattttttttagtagagacggggtttcaccgtgttagccagcatggtctcgatctcctgacctcgtgatctgcccgccttggtctcccaaagtgctgggattacaggcgtcagccactacgcctggccttgtattttctaaaatagttatttgtgtgtaaagtttaagtagtaagatttacttaaagtacttctcagaaattgtcaaggtgaaactttcccatcattgccattttgtaactggtttgttagctaagggccttttcttttccctttgttttttcttaattcatttctttattattttaaaacacagagacatggtctcactatgttgcccgggctggtcttgatgagttcctggcctcaagcaattttcccacttcagcgtcccaaagtgccaggattataggcgtgagccacygcacctggccttacaaaacagttttataatgattatttttgagatggggtctcactgtgttgcccatgttacctgtgaactcatgmtcaagtgatcctcccacttgaggcttccaagtagctggaactatcggcatgtgccactgtgtctggctttatcttataatgatcatataattattattaaagattataaaattcaatggaaagattatactatcctcatgtatcaaaagactaaatcttactagtgctcaattctccccaaattgacgtatagattcattgcagtcccttccaaaatcccacagaaattgacaaactgattctaaaatttgtatggaaatgcaaagaatgtggagtagccaaacaactttgaaaaagaactaagttggaagacatactacctgatttcaagatttaactataaatttgtaactagggaagtttggtattggtgtgagaaaatacgtagattaatggtatagaatagaaagtatacaagtagatccccacttttcaggctggggtgtgtgtggtggcaattcatttccacaaaggtgccaagataattcaacaagaaaaactcttggctgggcacagtggctcacgcctgtaatcccagcactttgagaggccagggtgagcgaatcatgacgtcatgagattgagaccatcctggccaacatggtgagaccctgtctctactaaaaatacaaaaattagctgggtgtggtggcgcatgcctataatcctagcttttcgggagggtaaggcaggagaattacttgaacccaggaggcagaggttgcagtgagctgagattgcgccactgtactccagcctagcaacagagtgagactccgtctcaaaaaaaaaaaaaaaaaaaaagaaagaaagaaaagttttttctcagctttcatgggcatttaacaccagaactacctgaagtatttcctgtagtccatttcatggtattgaagaaaaaccaaaattttatagatttttcttatcaactagagaaaaggtaaaaagcattgtagggaaataagggaattctgcttatcttctgtggtcccgttcagttaatacagataaaggattaaatttaaaaatctacattgccacaggattgcaacattacccaatctgggaaagcaatgatgaaaaaaatctaaagcagagaaaatttagctctaactgtttaaaaaggtccagaaagtcatacaattacagtaaattattcatatttttgtttcccaaagctaatatatactagtataaattgttttaaatgatggatgttttaatagtatttattgttcttaatatgtgcaagccttggtatttcaggaaaacagataattaaaaaaaaagcaaaaaatgcgcaagccactgtgctgaggaactttatttttaaaaactaccttttggccgggcacagtggctcacgcctgtaatcccagcactttgggagcccttgaggtcaggagttcaagaccagcctggccaacatggtgaaaccccatctctactaaaaatacaaaaattatctgggcctgaaggttcacagctgtagtcccagctactccggaggctgaagcaggataattgcttgaacctgggaggtggaggttgcagtgagctgcactctagcctgggcaacagagcaactccgtctcaaaaaaaataaaaaataataaactatcttttaatcctcataacagctatatgaagtgcagtttgtagacaaggaaattgaagcttagagaattatgtaacttgtccaaagtcacatggtcagtaggttatgaagccaatatttgaaccctgcttgactgcagaatgttcttttaacaattatgctctacttcttatggccatacatggtggtttacacctgtaatcccatcactttgtgaggccaaggctgggggctggggaggtggggggcatatggggggggattgctygagtccaggagtttgagaccatccttggtgacatggtgaaaccccgtctctacaaaaaatacaaattagctgggcgtggtggcatctgcctgtagtcctagctacttgggaggccaaggtaggaggatcgcttgagctcaggaggcagagaatgccctgccaaaagacaggttttttttttttagtttttttttcttttttgaggtggagtgtcactcagctcactgcaacctccgcctcccgggttcaagtgattctcctgtctcagcctcctgagtagctgggattacaggtgtgcaccaccacgcctggctaatttttgtatttgtatttttagtagagacggggtttcaccatggtggtcaggctggtctcaaactcctgaccttgtgatctgcctgccttggcctcccaaagtgctgagattacagacgtgaaccaccgcacatggcccaaaagatagtttttaaaaataaagttccttggccgggcgcagtggctcatgcctataatcccagcactttgggaggccaaggcaggcggatcacgaggtcagaagatcaagactatcctggctaacatggtgaaaccccatccctactaaaaaaaatacaaaaaaattagccgggcgtggttgcaggcgactgtagtcccagctacttgggaggctgaggcaggagaatgacgtggactcgggaggctgaggcaggagaatggcgtggacccaggaggtgaagcttgtggtgagccgagatcgctccactgcactccagcatgggcaacagagcgagattctatctcaaaaataaataattaaataaataaaataaagttcctcagcacaatggcttgcatgtatttttctttttttttttaaattacctattttcctgaaacaccaaggcttgcacatattaagaacaatgaatactattaaaacatccatcatttaaaataatgtatactagtatatattagtgagccaagatcatgccactgcactccaacctggatgacggagtgtgactctgtctcaaaaaataaaacaattatgtctacttcatattacagataaaaggtaaagaactttaatgtggtactagaaagctagctagaatagttgaaggagaggacttcataatagataaacttgccataagccctaaagtatagatgtgtttaagcaaaggaaagaagaacagagttaaggggtaagagcttgccaggcgcggtggctcaggcctgtaatcccagcactttgggaggccaaagcgggcagatcacaaggtcaggagatcgagaccattctggctgacacggtgaaaccccatctytactaaaaatacaaaaaattagctgggcgtggtggcaggcgcctgtagtcccagctactcgggaggctgaggcaggagaatggtgtgaacccggcaggcagagcttgcagtgaggcgagatcatgccactgcactccagcctgggtgacagagtgagacttcgtctcaaaaaaaaaagaaaaaagaaaaaacctgaataaaatagggtggtgggttgcagtggatatgtgaaatattttaaagtaggttttgttgactaaatggctgcataatgaggaatgaaagagaaaataagccaatattaatgtggattttaagcccttaatagaaatagggagttggttggaaagaacatttgagaaggaagacaaagtttgattttagttatgtttagttggaaaccataattaaaaattcaagaaaagttcttctgtagggagtcaggaaaagttcttctgtagggaggtagagctaagggattagagtgtacatttggggataaagatttgtatgtactcagagtaagatattttcaaggtcctaagtcccaagcaacatctgacttaaaacagcttatcaagggaataaatctagtgcctcggagtggattttaagttactcagctggaatccacctctaaaaacatgtaaatgttaaagcttatattgaagcttgagttaattctgaatattttctaattgaaaaaaatattcttggagaagatgtttaagtgattaaatatagtaggagaaagaaaattcaagagaactggggagataaatgtgtttacattatttttttttatttttattatttttgagatgaagtcttgctctgtcgcccaggctggagtgcagtggcgcaatctcggctcactgcaacctccgcctcctgggttcaagcgaatctcctgcctcagcctcctgagtagctgtggttacaggcctgcaccaccatgcccagctagttttgtatttttagtagagacggagttttgccatgttggacaggctggtcttgaactcctgacctcaggtgatccacccgccttgctctcccaaaatgctgggattacaggcgtgagccaccgtgcctggccaaaaatgtgttttaaaatcattgctcatgaaagatgatattaatacaaaatatttgtcgtacattagcactataaaattcagcctatgctgaagctaagctgcgggaacactctgaaggagaaattgagctctcttataattggtcttctaagctggctgccatttttttgtgaaaacttatatgtctaaatacctgtaatctaagcatttctacattagatagcacaattaaataaataattttttaaatgtctaaatgtgagttcttaattcatttcagaggggatgcgaaaacaaggcttatttcaatggctcgattctcttcagattgataacctcacctctccagacctgcagctcaccgtgggagcagtgattgtggaggaaatgagagcagccatagagagggagactgkttttcagtgttcagctggaatttcacacaataaggtgaaggctaatagtagatttcaaagagaaacattgatatccttagtcaaatacagtagggacagtgggacattgaaattattacacataggcygggtgcagtttcgcacgcctatgtgagtggatcgcgtgagcccaggagttgaagagcagcctgggaaacatgttgaaacccagtctctacaaaaaattagccaggcgtggtggtgtacacctacagtcccagctactcaggaggctgagatgggaggatcagctgagtccaggaggttgaagctgccgtgagccgaaatcatactactgtacttcagcttgggcgacagtgagactgtcaccaaaaaaaaaaaaaaaaagttgttacacatgtactttgaatggatttcttttaaaattcatgttgaggcccaaatcaaagcataagtaattctttaacatggaaatggacattaaatatgtactttcctaagaagcaagctgaaggccgggcatgggggctcacgcctgtagtcccagcactttcggaggctgaggcaggtggatcacctgaggtcaggagttcgagaccagcctgaccaatatggtaaaacaccatctctactaaaaatacaaaaaaaaaaaaattagccagacatggtggcgtgcacctgcaatcccagctacccgggaggctgaggcaggagaattgctttaacctggaaggtggaggttccagtgagccaagttgtgccactgcacgccagcctgggcgacagagcaaagactccgtctcaaaaaaaaaaaaagaaaaagaaaagaaaaaccatacactataagaacaatttatatagcatttacattgtacgttataggtgttataagaaattagagatgatttaaagtatacagaaggatatacaaaggttatatgcaaatactgcaccattttatattatgggacttgatcattttatatacgggacttggggttttggtatccactggaggtcttagaaccaatcccctgcagatattgagagatgacagtatttccttaatgactgaactgtttgttggaaaaaggaggctagtctttgcacttacatacattaatgtatttcttctattttcacttgctgaattttttttttttttttttttttttgagatggagtctcgccctgttgcccaggctggagttcagtggcccaatctcagctcactgcagcctccgcctcccgggttcaggtgattctcctgcctcagcctcccgagtagctgggattacaggtgcacaccaccatgcctggctaatttttgtatttttactggagacagggtttcaccatattggccaggctggtctggaactcctgacctcaagtgattcacccacctcggcctcccaaagtgctgggattacaggcatgagccaccgcgcccggccacgtgctgaatatttttgtattatcttgttatgtggaattgcctgggtattttatgcttttgcctattccctgttttcttatgagagcaataaaaggaataatacaattttattaatttagaccactattttaatttagggtacacagacaattctcaacaatccaggagcagaataactggttttctgattaattatgaataaagtgtagcaagagcccaggactttcatccccttctgaccaaagctcagtaattgggcagtggctgattttccctggttgataccttctccgcctcccttcaatacaaggaaagttgccaaactacccatctgaatttttttggtgtttttttttttcctggttggatgaagggaaaggaaacaataacttcaatgtaatttaaaccagactaaatgttgcctagtagaagttcttaacgaatctctctaatgaatttaataattttatattttaaaacatacaaatataatttttaaattatattaaaaaattaaaaattatatttttataatttgcaaaatgataccattgaagtgcttttactcttagaaaagatttctcttggccgagtgcggtggctcacacctgtaatcccagcactttgggatcccgaggctggtggatcacctgaggttgggagttcaagaccagcctgaccaatatggagaaactccgtctctactaaaaatacaaaattagctgggcatggtggctcatgcctgtaatcccagctactcaggaggctgaggcaggagaattacttgaacccaggaggtggaggttgcagtgagctgagatcatgccattgtactccaggctgggcaacaagagtgaaactctgtctcaaaaaaaaaaaaagaaaaagagttctcttgggaggctgaggcgggtcgacagatctcaaggccatcctggccaacatggtgaaaccccgtatctaccaaaaatacaaaaattagctggacatggtggcgcacacctgtagtcccagctacttggaaggctgaggcaggagaattgtgtgaacccggtgcgggggcggttgcagtgagccaagatcacgccactgccctccagcctggtgacagagcaagactctgtctcaaaaaaaaaaaaagttctcaaggatttaagctttttcattttttaagtgctatttataagaaggtgtttgttattggagggtggttttgagcccaatctctataacagatactatattatgataatttgtgttaaattggggactcaaaatggaccaactattaatcaagaaatgtaaatgggatagggtaaaacaagtatgtttcggcatttttgtatagacatactgagaaatgcatcttgcttgagtttctcctgcagtttctgcttttcaaacctcttgaagtaggaatagatgggaaggaaaaaatgactagaggaaaacagaatgggagagatgtgggaagaacagtgaggataatgatattgcgtcatgtttcccactggggatgttgtgggataccaagttttagagatgtcttgagtttctggttttatttttgtttttaatgtagaaaccattagttacagctattaagctctgygtgtgtgtatgttatgtgtatgtttatattcaccaactttgatgggttgacagtaatgaggtttttatactttgcatgcttccaggtcctggcaaaactggcytgtggactaaacaagcccaaccgccaaaccctggtttcacatgggtcagtcccacagctcttcagccaaatgcccattcgcaaaatgtaagtattcaggcagcatgttaaatttcacttctatccatgtgtagaaactctctggttgtagtttcttgtgttactaattaaggactggagccaggggaaatacataccaggcagttagaaggaaaacaacacagaacattttgaaacacacgctgagacttttatttttatttatttatttattttttgagacagagtttcactcttgttgcccacgctagagtgcaatggcacggtgtcagctccctgcaacctccacctcccaggttcaagcaattctcctgtctcaggctcctgagtagctggaattacaggcgcccaccaccacgcctggctaatttttgtaattttagtagagacagggtttcaccatgttggccaggcaaatctcaaactcttgacctcaggtgatttgccctcctcagcctcccaaagtgttgggattacaggcgtgagccactgcgtccagccacgctgagacttttattgaaccttcaattctgggttatctgtggcagatacttaatcctgaattaaaaaaaaatgagccaggtgtggtggctcacacctatagtcccagcacttttggtaggccagggtgggtggatcgcttgagcccaggaggtcaaaaccagtctaagcaacatagtgagaccccatctctataaaaaataaataaataggccgggtgcggtggctcacgcctgtaatcccagcactttgggaggcgaggcaggtggatcacctgaagtcaggagttcgagaccagcctggccaacatggtgaaaccctgtctctactaaaaatacaaaaattagctgagcgtggtggcgggtgcctgtaatcctagctactcgggaggctgaggcaggagaatcacttgaacccaagaggcggaggttgcagtgagccaaaatggcgcccttgcactctagcctgggtgacaagagcaagactccgtcttaaaaatatataaaaaataaataaataaaccaagttttagctaaatgtttaacttcccgctagacttttttatttaagtctgttattaagtaacaaataggaattttacttcttttctttcctctaatagcatatcaaggtgttcagggctgctgaatttcagctctcaaagtaggcattagagaagaagccaagtcaaatgaacaggttgtgcctaccagttgtgtggccttgacaaggacttataatattgtagaaaggacaaggtaaaaagcaatagtaaaagtgctgtcataagactgcataattgataaatgaattgtgcagtagaacaaacttcacaaaagaagggagtatttggagatggatttataaaaaggcatgggattttgttttgagatttggcaaaatttggagagtcagacaaaaacagcaaagcagtactgatttggagaactttttagcacaaagaagggaaagtatgagatattttcagtgaactgggacctaaagtagtttagctgcaccatattgaggaggataatggaaatagactgaaaagatggtttaaagacagattacagggagcctcaaaggctgggctaaagaattttgacttttttttttttgagacaagtcttgctctgttgcccaggctggagtgcagtggcgcgatattggctcactgtagcctccacctcctgggttcaagcgattctcctgcctcagcctgcccagtagctgggaccacagctgcatgccactacgcccgactaatttttgtatttttaggagagatgaggttttactattttggccaggctggtctcaaactcctggcctccaatgatctgcctgccttggcctcccaaagtgctgggattacaggcatgaaccactgtgcccagctgactgtttatatttaggttatgtattcctttttttttttttttttttttttgaaacagagtcttgctctgtctcccaggctggagtgcagtggcacaattaagagctcactgcagccttaacctcctgggctccagcaatcctcctgcctcagcctcccaagtagctgggagcacaggcacatgccaccatgcccagttaatttgctggagtacagtggcacaatctcggctcactgtaacctctgcctcctgggctcaagtgatcctcccacctcagcctcccaagtagctgggactacagctacatactaccacacctgactaatttttttgtattttttttgttgagacagggtttcgccatgttgttcagactgttctcaaactcctgggctcaggtgatccactcgcttctgcctcccaagtgctaggactacaggagtgagccactgcacctggccttaatttttttttgtagagttagggtcttactttgttgtccaggctggtctcaaactcctggactcaagcaatcttcccgccttggcctcccaaagtgggatcataggtgtgagccattgtgcctggccagattatatattcttaagtaaagttttagccatggaagggatttattttgtgtttgggattttaatccccaaacaggacagcaggcgttgtacaattgaacgttttatatacagtttacttgatagttaatcaaggactttaaccttttggttatgttatttttaatcttcttctcaaattctaactcccagagtaactgaattcccagaatatatgctctcatttgtcctgaaccttttggagagctgtttacaaagtrgaatgtcttacgtttgctgctaattagatagttatrrtgtgacctatcaattctttgtctcctttgttatcagccgtagtcttggaggaaagctaggggcctctgtcattgagatcctagggatagaatacatgggtgaactgacccagttcactgaatcccagctccagagtcattttggggagaagaatgggtaagtgattcattttttttwaaatcataacctttatggagatgctatattcaaatatagacaaaaccatctagtaaaatccagacctatctttaggttaacatttgtttcttgagattatttcactggttcttcttgcttcaatatcttgggtcactatggcccatcagtctagagtagttttttccatgtacctaggtggttgatagataagatttgttactttgatgcctgagtatatactaattacatcattcatgcatgctgagatgctatattctcttaaaatccttgtgtttaatgccctagcaagcacacacacattttgggatatgaatcagtggcttgcttggcatttttccaaaaatacaaatgatgacttggctttagaagacaaaaccagtgttctcattgtccatatattgcactggaattcactgagaagggcaggggtttcgtcagaggtccggtacactaaattttggacaaggttttcctttttcatgaaaaagataaaagggcaatataatatagttatttggttttgttttaacaagaataatcatttaatttcaccttaacgttttttgctggtcttattaggtcttrgctatatgccatgtgccgagggattgaacatgatccagttaaacccaggcaactacccaaaaccattggctgtagtaagaacttcccaggaaaaayagctcttgctactcgggaacaggtaagctggcattcttgacagaacactrcctcttttaaaggggtcagtgggtaggttttggtagctgtggaaggtttaataggttagaggagacctttataaagtatgaagaaaacagatgttctgtccttgggttgaaaattgactagtttatgattattacttttttctctttcgtctatcgaaataaaatggaatttctcatttgtttagtagatggagacttggaaagcctaggatattatgcttcaagtttgggtcttgtctttttctcagagctggaacatgcttgaaagtcacctgatggcaaacaagcaggaaaagaaaatgaaaggcttgagctagggcaggacagaaggactgggaacatttctatgatctggtgatcctttgattatggggagtctttggtgcacaattctgtttgggagaaaaaaaagaacaaataacaccatctagttcttaatagacttcgagtgtttaaatgaaagattaaagtctcaatacttttttaggtacaatggtggctgttgcaattagcccaggaactagaggagagactgactaaagaccgaaatgatgtaagattttctttctttattcctggggtgggctttgcaatttacatatcagctgctctttaccttatggagcaggaacaaagacagaaaaaagtattagcataggaaatatccgttttctttcttttttttttttttttttttttttgagacatggtctcactctgtctcccaggctgagtacactggcacaatcatggctcactgcaacctctacctcttaggctcaagctctcctcccaactcagcctcctgagtagctgggactacaggtgcatgccactacaactggctaaatttttttattttttgtagagacagggtcttgctaggttgctcaggctggtcttgaactccagccaaggaaattttaagaaatctttttaaattttttaattttttaatttttttttgagacatagagttttccctcttgctgcccaggctggagtgcagtggcatgatcttggctcactgcaacctccgcctctgggttcaagtgattctcctgcctcaccttcccaagtagctaggattacaggcacataccaccacacccggctaattttttgttttgtattttcagtagagacggggttctaccatattggccaggctggtcttgaatgcctcacctcaggtgatccgcccacctcagcctcccaaagtgttgggattacagacataagccaccacgcccagccagtagtggcagttttaagcacattttattgtgtatatttgatgtttacaacatgatgctatgggatacatatagtaaaatggttactatagtgtagcaaattaacgtatctatcatttcacatacttttttgtaaaaaaaaaaaaaagtagttaaaatctacttaaaatctctaatagaattttattaactatagtcctcacttgtacattagctcaatagacttgttcaccctacgtgtctgctactttatatccttttacttacatctccccatttcctcctcccctcccccatcccaggtaaccactgttttattctctatctctgtatatttgacttaaaaaaaaaattctgagcattgtacatttttctttctaatgttaaagacatctgatgattagtttctctcctttttttttttgagactgagtttcgctctatcgcccaggctggagtgcagtggagcaatcttggctcactgcaacctccacctcccaaattcaagcgattctcctgtctcagcctcccgagtaaccgggattacaggtacctgccaccatacccagctaatttttttatttttagtagagacggggttttaccttgttggctgggctgatctcgaactcctgacctcaggcgatctgcccatcttggcctcccaaagtgctgggattacaggcatgagccaccgcacccggcagtttctctctcctttttaaatagctttattgacatatactttacataccacaaaattcacccatttaaaataattcagtggttttagtatattgcagagttctacaactattctacaattttagagcatttttatcaccccccaaaagaaatcctgtgcccattaccagtcactccccatttctctcccagctactccccagccctaggcaaccactacactgcttaactgttctggacatttcatataaatgtggtcttttgtgaaaatatgtggtcttttgtgactggcttgaagtctttcacttaatatgttttcaggttcagccgtattgtagcatgtattagtacttagtcattttttgtttgttttgtttttgttttttgagacggagtctcgctctgtcaccaggccagagtgcagtagtgcagtctcggctcactgcaacatccgcctctccagttcaagtgattctgctgccttagcctcccgagtagctgggattataggcacgcgccaccacgcccagctaatttttgtatttttagtagagatagggtttcaccatgttggccagggtggtctcaatctcatgaccttgtgatcttcctgcctcagcatccaaaagtgctgggattacaggcgtgagccactgcgcccggccaggactgacacctttttatggctgaataatattctattgtattaatatataccatattttgcttatctacttattagtgaatggacatttgagtatatttccacttttggctattatgaataatgttgatatgaacattcatctacaagtttttgtgtagacacctgttttctttccagcatataccttggagtataatttctgggtcatatgttaactctatgtttagcattttgaggaatcgccagactgttttccacagtggctacaccatttcacatccttaccatcaatgtaagagggttccaatttttccacatccttgttactgactttttaaattttagccattctagtgggtgtgaaatggtatctcattatggtttggcttacattctctgataatcttttcatgtgcttgttggacatttgtatatctttggggaaatgtttgttgaaatcctgttcctgggccgggcgtggtggctcaaatttttggaggccgaggtgggcagatcacctgaggtcaggagttcgagggtagcctggccaacatggcgaaaccctgtctctactaaaaatacaaaaattagctgggcgtggtggcgggcacctgtaatcccagctacgcaggaggctgaggcaagagaatcgcttgaacctggaggtggaggttgcagtgagccgagattgcgccattgcactccagcatgagcaacaagagcaaagctccacctcaaaaataaaaaagaaaaaacaaaaatcctctccccttttttaaattgggttgtctctttattattgagttttaacatgtcccttgtcagatacgtgatttgcaaatattttctcccattctgtgggttttcttctcactttcctaatggtattgtttgatgcatcctcttcttttgaaatgtcttggagttctacaagtcaactgtacatgtcaagaatagtccaaaactgctcgttgctcctttttagctggaatgggtggtaaatgtttgttcctttggtaggcatcataaagagggatttgatccagttgcgttatcgcccttttccgcttttgcccactaggtggcacttgtttctcatctctctctaagtccctggggcctttctttccacttttttttcctaagagacagggtcttggctgtcatccgtgctggagcacagtaatacaaccttagctcactgcagccttgtagcctcaacctcctgggctcaagtaatcctcctgccttagcctcccacagtgctgggagtacaggcatgagccactgtgcctagccttttcttccctctttgtatccagtggggatccctgaaaatctatcttttaagcttcaaaggactttatgccaaaaataattcaggacatagcagatcctatcacttcactgtttaaaacattccagtggtttcccttcacacttaaggcatattaaggaattttttaaaagtaattctataaagccaaatataatctaatttcttgctacttctctgaccccatctcttatcttcccctcacttattctagtctccacttcactggcctccttccctttatctaacacactaagtaagctcttactttagcacttcccgtttctttgccctggagactctttgttcatatattcttaatatttgcttccttgatttattcaaatctctgtgcatgtattacattctccaggaggtcctccctagttaccctatcacagcagcagcctccatcactctctgccttattctgcttttcttcatagcactcatctctgtggtcatttctgttacatgtctattttttattatctatagttcctactacaacataggatccatgaggacctggactttattttgttctctcctgcatctctaggcactgtctaggcatgcagttatagttgaataattttggtcaacaaggactcctttataattgctaatttgtattccctcaagatatataaatccatacaaatgtattttttatccaaaaagtagttcctgctcttagcttgtttgccttagggatacttcttctcactagcatcttttgataggggtcccttatgtagaattttcaccttcttatatttctgcctcttgaccattatgtctcagtttgctgagattacagcattcagatgcttcagacttcactgaaaagtgagtcatgatcttgctctctcaaggcaggctcactatatggtatcttctctagataagctgtaaaaaggtgttggtagaaacttctggaattggtggcgaatgtttgtttaccataagagccccagggcagaaaaaaagatatgacttgaagcctagttccactttgctttcagacaattacttacctgaaaccttccttcagtcacaaaatagtatctagtattgtagatatttgttataattgtcctgcttagacaccatgaaaaacatttaggggagtcccattttcatttgtgctgtcctgttcccatcatctgtcaaaacatcctaggatactccgatgttccataatccaaattatgtcttcttcagttactttttacacccagaaatagcattaacacttttttgtggaaccatgtaatcagatttctattcagaaaatgcattctgttgcatatatatagattctttttttttttttttttttttttgagacagagtcttgctctgtcatccaggctggagtgcagtggcaccatcttggctcactgcaacctctgcctcccaggttcaagcaattctcctgtctcagcctcccgagtagctgggattacaggtgcctgccaccacgactggctagtttttttgtatttttcagtagagatgggatttcgccatgtttgccaggctagtctcgaactcctgacttcaggtgatccacctgtctcagcctcccaaggtgctgggattacaggcgtgagccaccatgcctggcctctttctcttttttatattttatctttactctttgcagaactcagtttacctttattcttgacttttaaactactgtttccaaaccattgtcaccctggttcttttaatttcctctcctgcagttcagtacctagaattcagatgctcctcataactttatttctggtctccatcctttccacccacagaatgacagggtagccacccagctggttgtgagcattcgtgtayaaggagacaaacgcctcagcagcctgcgccgctgctgtgcccttacccgctatgatgctcacaagatgagccatgatgcatttactgtcatcaagaactgtaatacttctggaatccagacagaatggtgagttcttttctagctcatcttctcagaatagatgatgattcttagctctgtcttagctctacaagacataatttttatcataaagttcctcattgtgtctaatcactcaaattttcacatgagctgaatttcagaagatgaaatatgcttttatgtacagattagtccttcaatgaggtaaagggtaaatgtcattttaaagttattattaaagtatcggccgggcgcagtggctcacgcctgtaatcccagcactttgggaggccraggtgggtgaatcacctgaggtctgtctcagttctacaagtagtaggaatctctgtcttagctctacaagtagtaggaatctgagctcttccatctgggatagactctgactcagactaccagtacctgttactctgggagaaaatacagtaccaacctcagaaacaagacagctcagcacagatcctttgccgacagctgatacattccagttcccaggaggttagacccttactctgtattggcttggtcagggaaatgaccagttgcacttggagaacagagctcaaatttcaaggatacatttgggaacttcaaactacttgattgttctatcttaaaagcatatttcttgattataaaggtgacctgtgttcactgatattctctatctgacatcccaactcagttacaagctccactggtattataccaaatgtcatattcattagtaaacttcacttctgttggtcatgaaatataagcctctttttggagcatcttcattttctgtccagatattaatgattttcaggattggaatcctttaattgcatatttaataaagcccttactttttttaaagtattccaaattcacaatagaaatataattatgagagagaggtaagtcagttgctcacttacagatgtatattgaatattatacaaaataaaatcaaagtttagttaatcgcttattacttatctaaatatattggcagtataattatgtgtacagacctataatatggtggagtctcctagtctttgttcatagggccgggcgcggtggctcacggctgtaatcccagcactttcggaggccgaggcaggcagatcacctgaggtcaggagttcaagagcaccccagccaacatggtgaaaccctgtctctactaaaaatacaaaaattagccaggcatggtggtggrtgcctataatcccagctacttgggaggctgaggcaggagaattgcttgaacctgggaggtggaggttgcggtgagccgagattgcgccattgcactccagcctgggcaacaagagcgaaattccgtctccaacaacaacaacaacaaataaataaataaataaataaagtctttgttctgagaataatttacttaatacttcctgatatatttattttcaaatattgaagttttacaaaaccaaataacaaccgtggtactaatgtacacatgaaaccttatttgaaaagttataaattgacaaactataacaaatactactcaccaacggtgtgaaactccgtgatgcacagggaagcatcaaaattatctgattataagactgtcccaaagcatgaaacctgaggatattgggatactttttttttttttttttgagacggaatctcgctcttgttgtctaggctggagtgcagtgacgcaatctcggctcactgcaacctctgcctcccgggttcaagcgattctcctgcctcagcctcctgagtagctgggattacaggtgcccgccaccacgcccggctaaattttgtacttttagtagagacagggtttctccatgttggccaggctggtctcaaattcctgacctcaggtgtttcacccacctcggcctcccaaagtgctgggattacaggcgtgagccactgcacccggccaatagtgtaataataactttaaaatgacatttaccctttacctcattgaaggactaatctgtacataaaagcatatttcatcttctgaaattcagcttatgtgaaaatttgagtgattagacacaatgaggaactttatgacaaaaatttctgatttttttttttttttttttgagagggagtctggctctgtcacccaggctggagtgcagtggcgcaatctccgctcactgcaacctctgcctcccgggttcaagcaattcttctgcctcagcctcccaagtagctgggttacaggcgtgtgtcaccacacccagctaatttttgtattttagtagagatggggtttcaccatgttggtcaggctggtctcatactcctgacctcatgacccacccgccttagcctcccaaagtgctgggattacaggtgtgagccaccgctcccggctatcacaagaatttcttaaaatgtttctgaaattgggactagtaacgaaaagcagttgtggaatttcattctctagaaattccagagtggtaagtcagtcagggttaggtagtgccctgtttaaaaacaggataatggctaagaggattttttcaagtctttctagtctaaatattctaaagctttttgttgtcctgaataaaatttcttgccccaaccctgaattacagcagctttccagtggtaccttataaaaaacaataatctctagctgtcgggaggtgagtggttgctaaattagtggttctcaagacataacatcagcatcacctaggaaattaaattctctgtcatcccaggtctgttaatctctgatacacattaacgtttgagaaccactgcagtaaagaataatttctgtggcagaaccagaatgctagtcatctatggattaaatctgtcctatggtgaaataaaacagatacaattcatggaattagcaataggtcactattttaatcttctaaattgctaatcatcttatttctttactttctgtataggtctcctcctctcacaatgcttttcctctgtgctacaaaattttctgcctctgccccttcatcttctacagacatcaccagcttcttgagcagtgacccaagttctctgccaaaggtgccagttaccagctcagaagctaagacccagggaagtggcccagcggtgacagccactaagaaagcaaccacrtctctggaatcattcttccaaaaagctgcagaaaggcagaaagttaaagaagcttcgctttcatctcttactgctcccactcaggctcccatgagcaattcaccatccaagccctcattaccttttyaaaccagtcaaagtacaggaactgagcccttctttaagcagraaagtctgcttctaaagcagaaacagcttaataattcttmagtttcttccccccaacaaaacccatggtccaactgtaaagcattaccaaactctttaccaacagagtatccagggtgtgtccctgtttgtgaaggggtgtcgaagcyagaagaatcctctamagcaactcctgcagagrtggatttggcccacaacagccaaagcatgcacgcctcttcagcttccaaatctgtgctggaggtgactcagaaagcaaccccaaatccaagtcttctagctgctgaggaccaagtgccctgtgagaagtgtggctccctggtaccggtatgggatwtgccagaacacatggactatcattttgcattggagttgcagaaatcctttttgcagccccactcttcaaacccccaggttgtttctgccgtatctcatcaaggcaaaagaaatcccaagagccctttggcctgcactaataaacgccccaggcctgagggcatgcaaacattggaatcattttttaagccattaacacattagtgctgccctcaggcttgcctgtaggatttaatattttttatctttacagrtctttatctttaatattttatctttacagatttccctgagaaagggaattatgaaatttttaatacaaaaaataatccatttaggtgctgagttacggtcccatctcttcacaggcatggattctaatcccactgctgacagagatgtaaaaattcatcctaccagagtttttaatctttagcatttagggaggcagtgtcataaagtaaaaagtgtgtgggccttggagtctaagagacgtggttgcaaacttagctctggttattgcaatgagggccttgaacaagtcattttcttcacattctcatctgtaaaatggagataataccttacagattattgcagattaataacaatgtattcaaattatgtaactcggccgggtacaatggctcacgcctgtaatcctaacactttgggaggccgaggcagacagatcacctgaggtcaggagtttgagaccagcctggccaacatggcaaaaccatctctactaaaaatagaaaaattagccaggcacgttccaggcacctgtgatcccagctacttagaggctgaggcagaagaattgctttaaccttggaggcggaggttgcattgagctgagatcatgctagtgcgctccagcctgggcaacagagcgagacttcatctcagaaaataaaaaataggggccaggcacagtggctcatacctgtaatgccagcactttgggaggccaaggcgggcagatcacgaggtcaggagtttcagaccaatatggtgaaaccccatctctactaaaattacaaaaaaaattatccaggcgtggtggtgcacgcctgtaatcccagctactcrggaggctaaggcaggagaatcacttgaacccaggaggcagaggttggagtgagctgagatygcgccaccgcactccagcctgggcaacagagcgagactccatctcaaacaaaaacaagaacaaaaacaaacataaagttggcacagaaaagggaccaagtttaaaaaagggttttaaatgtaatgagacttgcatagttaaaaaaaaaaaagggattatttttatttttattttttatttttgagacggagtctccctctgtcgtcaggctagaatgcagtggtgcgttctcagctcaccgcaacctccgtctcctgggttcaagcaattctcctgcctcagcctcccaagtagctgggactacaggcacgtgctaccacactcagctaatttttgtatttttaatagagatgaggtttcaccatgttggccaggatggtctcgattgcttgacctcatgatccgcctgcctcgacctcccaaagttgctgggattacagatgttagccaccgatcctggcccccccaaaaaaaggattttaagaaaaacttctcttggccgggcgcagtggctcacgcctgcaatcccagcactttgggaggccgaggcgggcggatcacaaggtcaggagatcgagaccacggtgaaaccccgtctctactaaaaaatacaaaaaaaaattagccgggtgcggtggcaggcgcctgtagtcccagctactcgggaggctgaggcaggagaatggtgtgaacccgggaggcggagcttgcagtgagccgagagcgcgccactgcactccagcctgggtgacagagcgagactccgtctcaaaaaaaaaaaaaaaagaaaaacttctctttaggctgggtgcggttcctcatgcctataatcccagcatttagggaggctgaggtgagtggattgcaggagctcaggagttcgagaccagcctgggcaaggtggcaaaaccccgtctctactaaaaaaaattagctgggcttggtggcaggcgcctgtaatcccaggtactcgggagactgaggcaggagaattgcttgaacctggaaggtggaggttgcagtgagttgagatcacaccaatgcactccagccagggtgagagtgagagactgtctcaaaaaaaaaaaaaacaaaagaaaaacttctctctagctctgtgacgggcagttcagataataccttcaccagatttacctgttttcagctgaagaatgtgagatgaagccttgaaaccctaaaagtgatatggtaactagggcaggtctttctgtacataaaagtgacttaataaacagtgaatttcatacaggtaaaccctattataccctcagttctaaccattggcctatctcttgcgttttgttctaatgtagaattagattgctacttgactagttcaggaactctgtttagatctgataagtcataatcaaatcttgccaggcgtggtggtttatgcctgttatcccagcactttgggaggccaaggcaggtggaccacgtgaagtcaggagttcaagacaagcatggccaacatggcgaaaccctgtatctactaaaaatacaaaaattagccgggcatggtggtgggtgcgtgtaatcccagctagttgggaggctgaggcaggagaatcacttgaacctgggaggcagaggttgcagtgagccgagatttccactgcattccagcctgggcgatagagtaactctgtctcaaaaaaacccactagatcatctctagaacattgctactcccaagtatgatttgaggaacagcagcctcagtatcaccagggaacttattagaaatagtctcagcctcaccactattcccacttaattgtaatctgatattaacaagatttcccaatgtgggtcaggtgtggtggctcatgcctgtaatcccacactttgggaggccaaggtgggcggatcacttgaggctgggagtttgagaccaggctggccaacatggggaaaacccatctctacaaaaaataacaaaaattaggtgtgtgtggtgacgcatgcgtgtaatcccagctacttaggaggctgaggcaggagaatcacttgaatctgggaggcagaggttgtagtgagctgagattgtgccactgcactccagtctgggcaacagagtgacactgtttaaaaaaaaaaaaattcccaatgtgggccgggtgcagtggctcatgcctgtaatcccagcactttgggaggctgaggtgggtgtatcacgaggtcaagagatcaaggccatcctggccaacatggtgaaaccccgtctctactgaaaatacaactgggcgtggtggtgcacgcctgtagtcccagctacttgggaggctgaggcagaagaattgcttgacctgggaggcggagcttgcagtgagcccagatcgtgccactgcactgcaccctggcgacacagcaagactgtctcaaaaaaaaaaaaattcccaatgtgtatcttaaagtttgagaaatgctgatctaaaagatactaatgaccaggtgtgtagaggacattttcttaagcccttaagtacaaatttaagaggtaagtgcttcagccattagggttactggcttgttcatctttcccactgagtgtaaatatttagcttagggtttaaaatttgttatgtagctttttgcacttgtccatgtttatactactgtattattattatttttttttgagatggagtctcgctgtgtagccaggctggagtgcagtggtgcaatcttggctcactgcaacctccgtctctcgggttcaagcaattctcctgcctcagcttcccgaatagctgagactacaagcgtgcaccaccatgcccagctaatttttgtatttttagtagagacaggttttcaccatgttggccaggctggtctctatctagacctcgtgatccatccgcctcggcctcccaaagtgctgggattataggcatgagccaccacgcccagcctatagtactgtattcttattctccactcttgtgtgtgaaaagtcagctcttttggcttttctgttatggggaaacttgaattacacagggaacccaactgaagaaaatgaactgaagtaggtggcgctgggtgaagtgggcccagagaatggtgtacacatccctcccatacatatacccaaacttctatttttttatgtgacggagtttctctcatcgccccggctggaatgcaatggcacgatctcggctcactgcaacctccgcctcccgggttcaagcgattctcctgcatcagcctcctgagtagctgggattataggcatgcaccatcacgcctggctaatttttgtatttttagtagagatggggtttcgccacgttggccaggctggtcttgaactcttgatctcaagtgatccacccgccctggcctcccaaagtgctgggattacaggcctgagccaccaggccagccccaacttctactttttattttatttataaattggggggggggttctatatttagtttgaagaggtggggaagatttgaaaaccactagatttaccaggaaatttttttcttcaaaaatattttctgcttttatgatacttgaatatctaataaaagacaatatttagccagtcacggtggctgatgcttgtaatcctaacactttgggaggctgaggtgggtggactactggagccctggagttcaaaaccggcctaagccacatggcraaacagtctttacaaaaaatacaaagatggtggcttatgcctgtagtcgtacctactcaggaggctgaggttgggaggatcacctgaatctgggagtttggggctgcaataagccatgattgtgccgctgcactccagcctgggtgacagtctgagaccctgtctcaaaaaaaaaaaaaaaaaaaaaaaaaaaaaagactacattcactgtatacgtggccttttccccctaactagctatgtagcttcttaaaggcaaagattcttcatagtgctttgcacatgataggtgctgatactcattggatgaatgtatatagtgaagaattttagatctgattaccacaattgggatcataaacatgtataaactccttgggagtctgccttatatactttttatccccctaaatgttccattaatgttgcagagaggctcactagttcctggagatgtcttattaagtactgaaatgtgattttccaaaattttctttacaatacaggcaaaagataagtaaattgtggacaaagctttcatctctatcagcagctatagagaggaagtaaacagcttagcccctaatacaggaggaagttgttcaactacaggcttgttagtagcaagttaaaccagttacattttataaaacagcctgagtggtagggaagctatcactttaatactctagaggcagaatgccacataggactttgggtcacatatttcttttccagggtctcctcaaaatgcagtttctatttacagttgactttggcccctatttacccataaaatgtcaaaatcaagtagtatgaacatggaaacaggagcagggactaaggtttggtcaagtggccctcattgttccaagagtaatttaggctatgtaaacttgaaaaatatgggaccagattaccttttgtctctaaattctactcttctttaagtagctggcactgtatctctgccagggcacagaagtgggctccttactattctgaccactagcaagtggccaactcttcaaatacagggtagctacctatttcacgtgaaaggcctcagtattctgctcacttgaactacggaaaataggccacaatacttggttacaatactggaactctgaacctatgtggaggagagaaaaacaatggtgaacgagataccagctgggctctttccacattcagggctcagcagtgttggggtttcacttgtctctaatcctgaagaggtatctagccctggaaggaagctgagcctgtagctaacgcataagcacagtgtattcaataaaacatttttattctgtacaatatatatgtgtatttaaatatatatacatatgtatatatatatatatgcacagagaaaccttagccaacaaatccytgagtccatgggaacccaggacactaacaaagggaaaggagagtccatgcctaaagagtaggaaatatggcaacatctttccctttcctcctggttccctgcaacagagggaagggaacagtcactacaaattactaaaacgagggtttaggtggggcaggaaagtggggtgagagtggtaggatggggaactcagatgccaccagtctgggaaagtaaaacatttgatccagcatgaaagccaacatgaccgcagaggaaaaagaccagactgatgggcatgcagctggcctttggtatatgccaagcctttgcttggtagccccacgcctgggccagcacaacaaatagcacctgtggggcctataagccgggaggggatgggggagatagggactggggaaatggcccttgagtgaaggaaagggagataaagctgaggaagaggcctcaggcctcagcacagggtggcaacactaccattcactgtccctgtgccatttcttcagactctgggccgccaccaccaccagatggccaagagcagataaccttttgtccacagccaggtagagatgggcaacttacatggccttgagaagaggtatagaaaaaggagtgcttttgagggctaccccctgttgtgaccattcctgaagtgcagagaccacaccagcaaaacatgcccagtcttagtagtggggacgaagaattgatgagtggatccagtcagctccggcagacaggccacagggttgccaggtttgatgagccaaccaggtgagcacacagcttcggagcactgccctgaatcctgtcttctccctcaggactgccctttcctggccacaccaagtttggcacctctccagaaagttggcagggagcaagtggcagwcagcacccctctctccctagcctattaacacacagagccgccaatggcagggcagcatggccagaagtcaccttatatattgtagggacagcaatagaactgtccctgcctgaagggttcagaagcccatgttggcctgggcttmtcctgctgtaatggcttgtacatcagtgacatggccgatgcccttggtgacaccctcccggaacagcagtttggcgcccaccttcaggtactctgggtgtttcaggaagcggaaaygtaccactgccttctcgcctgtccgcagtttgtcctgcagcaaataagtggtcactcccctggccagtgccttctgtcccattctctgccagccgtggctctccaccctccagaggcctatcaggccgctacccaccctaagtggggttttattcccattgtgggatcaaggagttctctgccagtctggggcaggcctccctcttttctgacctctggagaaatggaaggccaggtccctctcaccttggcatggatcttttccaccactgccgtctgacgtacgttgcccacgtgtactgtcacctggaatcctcgtcggaaggtggtggcatggaacagtaagactatctctgcctcaaacaccgagcagatggtaggattcatctccgggctcaccatcaccatgccctggggaggaacaraccccaggcccaggaagggcagctctaacatcagactctccctccccagccaccccacaccctttatagctcctgaatttcctcttcctctacacaactctaaacacaaagacctcaaaagacaataatcaaaactctcagagggaatgagtctttacccacctcctacgtcctctagcccatctaacgcttcacatttttagggtcctgaacactaaaaatagtgttcattaaaaacagtgtaacatagtgattcatatttagttatctgtacctcatgagtacgttaagctgtttttatagtctacgtagctagaccagaagcttcttgggtcagagagtgtgtttcctctgagtttctctgaagcaccttagataggtgctcattcagtagccagtctcctaggcacttctcttagcgttccctccccaacccatgcacccacctcaccttgcgaagcagtgcacggtcaaagtccccaagcgccartgtagcagcctgaccagctcgcagyacacgacaggcagagcggttgcgctggatgctgcatactctcagctccaggaagcagccatcatccgtggggcccaccaccagctggtccccctcacggcaaatcccactgcagcccagagggcaggtggcacagtgtcagccaaggtccccatacctacttctctattaggatcacccagagcattccttcccttctagggttgagtccctcaagtggggaagaaccctaaattctgacttggatgtaacagggctcactgccagagttcagaatcagaagactaatttcataaaaggccagcagtgatggtggacagagagacacttgctggtttaacaacaccgaacacctaatcactgaaggagcaagttatccccttgggtttcattctctgctttgcagagtcttaggccagccgcgttggctcacacctgtaatcctagcacttggggaggctgaggcaggtggatcacttgaggtcaggaattcaagaccagcctggccaatatggtgacgaccccatctctactaaaaatacaaaaattagccgggcatggtggtaggcgcctgtaattccagctactcaaggctgaggcaggagaattgctggaacccaggaggcagaggttgcagtgagccaagatcgctccactgcaatccagcctgggcaacagagcgagactctgtctcaaaaaaaagaaagaaagaaagaaagaagagtcttaagtgacgtctctcatttccctgtgtgagatgaagtcagttgaatacactctagttttcttcctggagctcaagacccacacttctctctcaggggcctggagattccccaataggcagcaatactgtttcttccctccaaagccaacagactaccgttctccagctcttctgatagtgaaagcctaatctgcaaataagcatgtcctttaaatgggttccgttcaattccagggtctcctcctttgggccaggatgtctttgagtatataggtgagggctgagtggggagggtagcaagcaagacaatttacctggaaagtgttcctccaacaacagtccccacctctggtactgtgtagatttcatccacctgaagccaaagaaaacgctatcaatggcctgccaagtagggctggtgggtccaaaatctctaaacagactctgggtttggtctgaagcagcccctccctgtttcccagcctattagatgtttgggcagtcaactacctggaactccgtcagctgctgcatgagttcctcctgctctttgctgttggtgagtggcggcagaatattcagaaagactttgaggaggtccagactctctccagacacactggacaatgtgaagatgggggtgacactgtagagggaggcatggaatggacagatgaagacagtccaaacaggaggcagaggccagagccccatacatggaaaggtgagctttgttctggctgggggcccctctctcctgtctgcaaatggctcaggaactctgggccttcttgtgagccagtcgagcaatgtcacacaaaaagcccatccgagcccaagggaaacagcaaatgcctggtatagcacttcatcgccatggtcccaggcatcagcagtgctccaggttggctcgggaggagggtcaagccctttagcaagatgcccctccacaatcccaagctgaaacacccgcagaactaagccagaactggtctggccctggagaagtaggatatcatgcttctgggccctgggctctgtggcagccttcctagtggatcagggctttagagtaaggtgggcttacttgggtgactgagcaaactgctgggcagcagtgacggcatcatcctcagaggtgaccagcatggggaccttgtggcagccaggctgcttgaggacccgctccagctggcgtactgtcctctccactgtggtcttggcacataggtcgatcttgctgaccacgatgaagaagggcactttcagggccagggccagccccagatgttcccttgtggtgccagctgcctcataaggacagcaagcagcaggagagaagagtgagaatgcaggagggaggagagggaagaagaggagcattggtctgtctccaagatttgaggcccagggtaggagagtcagcaccccccttcagccctgtccctgccctaatgcctcgtaccaatcccagtgttggcactgacgaggagcagggcgcagtcggggcagtatgatgtgaggccaaagatggtggtgtgtaggtacttatggtggcctgccaggtcgatgaaggtgatcatcttggagctgctctcacagatctcttctgctgtccgtgagtcgctgtaattcaccacctggcccagggcccagggccctcagtgcctcctgccagcccttccaaccccttcagagttgccaggacctaaaccattccctgggtgaccctgcctcttaatcttgaccccattttttatttaatttagttgattccccattgatttcctaagaggggcagagcttgttcacagtcccctcagggcattcatctatactatttcaaaaagtctccacactctacccccatcctatgtccttcactactaccatcccatcctcagagtctggccccattgggtcccattgatcccatgcacctctcccttgctgttaaagcccaggatctcgaagctgatgctggaggttcggccagactgaatctcatgcaggtggcggaaaaggttgagccgagcccggccccgcccattgtccagctctccctgggtcaggactccaagcagagttgacttcccagagtccacattccccaggacggccacacggaggtctaggaactgtggatgaattgccagagataagaactccaatctctcacccctctaactgaagactgggtcaagggcagtgacgctccctagggagcaagtgatgaactggaagcccccaggatcccaggccaggagacagcctgccaccacagggcccttccacagtgtggacatgagagacagggatgggtgtgtgctcacctgttggttgtcagggacctttcgtactagcacctcggtgatcttccggggcatgtcgctatcataatccacttctcgctctcgaagaacggttatgtctgccccaaccctgtcacagcaaggccacagctgccatatctcacctgtccttctcctattccaggctcgctctggacctacagacttcctgcacctcccacagagctcccaataccttagtgcacttcctaccaccctccaatctattcctcattcacagttccctttaaaacaaatatacatatcttaattcaaggagcaaaacagcctaggtccagtgaggaggggaccaaaacactaaccctccccacttcagccctttgtcaagagaaggaaagtcccaccttggcccctcaggccctaggtaactgggtatgcatgggtccccccaagtcaggtaaaggagaactggtggggaaggggaagcatacttctctgccatccggtgcagggtcttgagcgaagctcgcatttcctcctcagccagccccaccagcagcccattgtcctctaccccaatctggtagacggcctcaccacgtccctcctggagccgccacttcatttgtgtcaccaggtgctcaaagcggtactgggatggattcaccagcttcaacttagggcaagtggggtatcataaggtgaaatcagaggtgttcctcccaaacctacatggtccccacctgttctgctgcaaggaccaggactttctctttccactt

SEQ ID NO: 94256 - DNA, 153330 bp, Homo sapiens
  misc_feature (1)...(153330): n = A,T,C or G
cctagtttgggccaacagccggaaaactagttagaggtttattgcagtaacccaggaaaggatgatggtgtactggatagtgtcacggccgtagagacggagataactgaagagattccaaagagatttaggagttgtaattgcatgttagaggaagacggggtgaggatgattcctagatttttgtctagggcaaatgggtggatgatgatttggggaatacaggagaaatagttgggaaaaggtaattaattttattttggagatactgagtttgaggtgtttggaacatatccaactgggtatttcccataggtaattggatttgatgtttagggtgcagaaaaaaggtctgggctaggtctatatggtagctatagatgttatatcgttattgaagacatggtaagggataaaattccttcattcaaaatatagtcatttaccagttcacagtatacacttagagatggcacatagaacccatcttactctattctccaaaacacctctgactcccctctatcttgccttttttcctgccttcccttctcttaccctcccctcacaccaaaacagaaatttcacataacttaatgaagacgtagtaatgtgtattataagagtattaccattagcttctcatccttcacttaaatattgatgtcagcaagatttcttcttgcaaagataacatcataccataatatttgtttcaattttagtgtcttaaagacttttctacatgatcctcttgtggaatggagtaaaccagtgaaagggcattccaaagcgccactgaatgaaactggagaagttgtcaatgaaaaggttagtagaaggtatagcttgatatgggctgtagtcctcatctctacaaatgaacttgatatgcagctatagttctcatctctatgcatgagaactgcttggaaatactgttagtgactattgattactctgaaatctagttctctagtatcacaatgccataagttttctttattgtcagtaatgttaacagtattcgcatttgtataataaaagttcatggcacacttgtttaaccatagacaattcacagttatgagatacagtaggaaaaactatagtacaaattgcctgaacttacagaacaacaggtctgagctttaatatcatgataccagtatgtcacaagctatgttaacaaatgcagcaattcacttcttacttagttgaagctgcaaagtttgcagatagttttgttgttgttgttgtggtggtggtggtggttgttgtttttgagacagagtctcgctctgtcatccaggctggagtacagtggcacgatcttggctcacggcaacctctgcctcctgggttcaagcagttctcctgccttagcctcccaagtagctgggattataagcgtgcaccaccacagctggctaattattatatttttagtagagatgggtttcaccatgttggccaggctggtcttgaacccctggcctcaagtgatccacccacctcagcatcccaaaatgcagggattataggcataagccactgtgcctagctcagatagttgtttttaataagttagaatagattgaggattcgttttttttggtggggggcactcttacatctttaataagtcttgtacaggcttactaaatacaatgaattataccaactatatgctaataaagattaaaaatttacattccagttaactacctaaagagtttaagtccactttcatcctactgatatagctcgaggaaggctagacctgtacgcccccatccttcatgtcatccttaaccctttgtcttgagaaagaaggtttagctgcttctttagttcttctaaaagaactaaaagaaaaatttctttttcttgctctattatcttcatctgtagggtgagattaatatttccagaattgtggaaaaattcactctgtagcagttgaagagcagatggtctctgggacatgttccttttcgttaagtgatagatatacttggcttgtactggataccttttactgagggattccaatatctgaccagttcttgaacctgttaaaacttctgctcgctccatttctgttctaaacagctgaaagagctctagcaggatcacactcaagctatatacatatctaactggacaaagccagccctggtctctacaaatagtttttttttttttttaattagctgggctcagtggcacactcctgtagtcccagctacttgggaggctgaggtgggaggatcacttgaccccaggagttggaggctgctgtgagctatgatgacaccactgcactccagcctgggcaacagagtgagacccttggcatcatactcagatccttccaactgctgggatgaagcatacagacaagtgcccactctggatataggtgttggtgttctctttctgtttctatgggtccagtctgtgttcttttgtaagatgtctgggcaagccagaccaaagtctcctatttttacttgctgatcagggccatgaagaaaaatatttctaggcttcagatctctgtttacaatacccatgttatgtatgtaaaacacaccttccactaaatcttgaaaattttttgttgcaacactggccataaggacaggcaaacttgcccacacactcttggccctgtttgtttctctcagctagccagtcccacagctggagcttgcacacctgcatctggatgtgcagcatcaggtggtactgcacctcgatccccaacaagttgaagttttctttggaagattcctcagtggatgtgaaattctcctctaggagggaattacacctgagcagcaggggctgtttcacaattgaccaggtagacaaaccagccaggccattttcctggagctccagggatgattcatattcactggtgtctcttaagacggaattgatggtgtagttcacagcttgttgttctgattttgagtgtcagattctgcaaagggtttttcttttctgaggtgagctccgcgaagataatgggtgagctgctattttcaccatttttaacaccgtattggtatctgtctgcttggtcggagaacacttccagaaatggcaactgaacggaagctctgtctgcttgtggttggaccacttgaacatgttctgtccacgcagtgtgataacgaatgatattagggtgctgaagacctgccagcaccttcattccccgtagttctttcatgtaatgtgtttttgttgcacccttaatcaggattttttaaattgcataatactgaccatctaatttattcctgaccttgtatactcttccatatccaccttttcctaagatggcaagttcttcaaattcatttaagtaacgtgaagtttgtgcttcaaagggtacttcccttgatctgattttctggatatgagaaatagcctcacaaggatcctgatgaactctctctttagtggacctcattaagtgagtaatagctctgtggtgatgtagtctcaatgagctaaacttgtcacaagtgaaagaagacagcagccccattttgataaaggtctggcaaagtaacttaaacactgtcttgaatgaactgggtttggttcacgcacatggctcaagtgcttcaccaaagaaataagcggcagctggtttgcaactgcaaaagggaaagttggctgttgtaggggttattttaatacctggagttctgctggaacataagtcatatttggagtccaggctcttggcggaaaagtcgatggcagatggcacagcaacagtctccaccccgtggccctcctctttgtgctcgtgggctgcagcgcagcccaccagcccacccagcaccacctctgagaattattcttctaataacgttattcttccttttgcattcagatatgcttaagaaattgtacagttccaagtagctcacttagaacacccatttgcatgtactaacataatgtaaatattaggcagtacagcattgttatttgaatattcattgaaatgtttaagtcctaaacacttccaaagcagatttaaaaaattatttttctagaattgtaatgtgtaaataattccctggtatttcacgtagtccagaaacatgtccaagcagttgatgttgaatcaatcttgcgagcctccaaatcagtatcacaagctaactgtatttgtttaatttcttcttttcctgtatttgctcttacaaaaggggtattggtcagtaaaatggtattaacatttattaaatgtcaaaatataaagaaaggtagtaattccaaattattaacatctgtttttggttttatgtttcttctttttaggccaagacccatgttcttgacattgagcagcgactacaaggtgtaatcaagactcgaaatagagtgacaggactgccgttatctattgaaggacatgtgcattaccttatacaagaagctactgatgaaaacttactatgccagatgtatcttggttggactccatatatgtgaaatgaaattatgtaaaagaatatgttaataatctaaaagtaatgcatttggtatgaatctgtggttgtatctgttcaannnnnnnnnnnnnnnnnnnnaaactgctttcttatacatactgtgcattataattggagaaatagaatatcatgtgttcttatggtcaaaaactatatttgcaagaaacaagcaagtctaatttcattttacaacttctattgatttccttttaaaagtcctagctattgtaaggattcacttgaagaacaaaattatatggaataaatactgtgggcaaggcgttgtgccagacttgtgcatagagctaccctctcctgccctccaggaagtgacagtctagtaagagagatatataaatataaatagcatatcattaagttcacttaataaaactttgttttaaagtgtgatagggaaaaaatataagccaagaagcgtgaatgtgaaaacgaaataaacattctgtaatttgtgtgatgctgccatactgcagtcccagaatgcagaatccagtggtcatgaaagacagcgatacttaacatttcctgagatcttaaaatccaaaaagtattaaatgtttaaggtttttctgtaagttttcatccagaagacttaaatacaaagtaacgggttaatacattcaaataagtggaaaactcttacatttaaaactgataatttcacttaagttgatagaactctcctttgctgtgcggttgaaagtgtgatggggaaaaatatgataaacccggatgcaagaatgtcaaaactaaacattaaatgatttcgtatccaaggtcttatgttaacagttgcggggggcgggtacatgggaaatttttttgaacaatttggaaaagaacgtttttaaacgtatgtattaagaaacgtaagtttaaattcctcagagaaaaaaaattattgacaaaacaacaaactaagccaagtaaatcaccagatctttcgaaatctgaatgaaaaatactgagattagcaaccctaggagacaagcggaacaaaaatcagtgttcgatacccttcccacaccttcgtacggttttcatgccacttccaaatccacttagaaagcacaactctatcatggggcattttcgcccctaagttgcaatacaccagcaaacctccgcagattccctgaccgccactggacagtaccgcggccccggccgcgcgaggcccggagggctaagccccgcccctcggacggctcggatcctgccgctctagnnnnnnnnnnnnnnnnnnnnnnnnnnnnnnnnnnnnnnnnnnnnnnnnnnnnnnnnnnnnnnnnnnnnnnnnnnnnnnnnnnnnnnnnnnnnnnnnnnnnnnnnnnnnnnnnnnnnnnnnnnnnnnnnnnnnnnnnnnnnnnncgggcgctctctatggtcggccgggcggtgtgttgtcatccgcggagcgacgaccggaggctgcggcggagccccggcggggcgtttggtttcggtttggscctgactgggattagtgttgacgatcgaaatgggagtccccaagttttacagatggatctcagagcggtatccctgtctcagcgaagtggtgaaagagcatcaggtgggtgagcgaggggcaackgctcagaaagccgaggacccggggctccgcggccctctccaccttagagctggggctttcgagccacctctttcccctcgtcgtctggacgattagtggcattagggagggggacggaaggtttgaggacgcccggatgagccgaaaggggctaaggacgcaggttgcctgtgtgtggacagagccgctgggttcacggcttctctgacagctcttgcttctgctggtccttccgcgactccgaaatgaagtcctgggaaagaacgcttttactgttctccggtttcctcccggggagctgcaagttgcctttttccttacagaggctgcgaagctggagtgggtgtcctcgtaggttcccccatcccacccagagcggcagacccacttacagacgataacagccgcttccgcacgcagtcaccttgtttactttccctgatctagagcgcggcccacccggcccccggagcctagactttccgacgtggctgatggtcatattggtgatgccttttgttactttctgttatttcaaaagcagcaccaatcccctgttgccaaaacaaaaaactcttgggccagctggggagtggggcgtaggaccttttatttggaggcctcactgtgtgacagagggggttgggaaacgaattgatagaacattaatactactaataatatttggcatgtactgaccccaggacaacgttaatgtgtagattccgaaaacgtagtttatatattggaactgtggaaagagaggagaaagcagtcgtctattaggtaaactagactttgggtgatactttggtgtttgtcacatttaatgaatttgatctcttttctgatgctttacagaaaaaaagcttgaaatttgtgtagctgattgaatcagttgtgatgggtagtattgtaaatagcctattaaattatggtttaatcggcatttacgaacatgaaggtagtttacttctggaaaggagtttttgttgctggattccaatcagatttggtagatgagaaatagactacaaaaagtttccaaggttagcttatcttgaatttatttgaaacatagattgagttaggtttagagaggtatttttttcccccggggagggctaaaaaggaaaccagtacattgcagaaatggagacaaccaactttggcttttcttgcatccttcagtcagtacctgctatatatcagtcactttatctctaaagtgcaaaaataatgcgattgttattcgtgatgatttaatacataatttgttcagtaatatttttattctgtagtctgtggcacagaatttggtttggtgaaaatatcttagattctctccatcctgaggaattttgttactgaagaatgaaaatctctttaatgcagttttatgacatggacactaaggataggttttgtgaaagctttatatagaaactgggaggagaattatttttaaatttcactgtaaataaattttaaaatttggttcattgttgtgatacctttcaaaaatgtttgattaaaaagagaccaaaggttatcagcttctctgttaagtagaacttaaagatggtaatgcctaaataagtcacaggcattcaaaagctagtcctgggcgggaaggatagggagaagaagtaagttacgggaagtcagtggtgtggcctcagtagcataggttttcagtttctctgaatcatcttgtaaaaacagaaagagaaactagaaaccaaagtttaaaatccataaaacaattacaacaaaccatgtgacatgctatccccatgaaactcaaaacataactaggtgaggcaaactatcaatagtctctagacaccgttgatattgccatctgtgcaaaagcgagaaggaagcaatggggcaacatctgatgaaccttagaacagaattccagaatagccagcggtatccactaaaagactatgctggccaattagatagcggtagctgaaacagaggagttttattcactccattattgactgggtgaaggtctaccataagaaagaccaaacaggcaggagtagtctacctcctgtgaacactcaaaactgacttgccaaggtgccattctagaccagagccctaaggaaaagggagtggaataaagtcttacggaaatgttatgctggaagtggaataaaattttatgaaagggacaatagagacaagaagagaaggagatagaccatataaaagtgaggcaaagtcatagaatcaagaaatcttagaaaacaaaccacaaagcaaaccactgtattttttaacactacccagaaacagctttgtgaacttatattccctgaacctctactcattctaaaagttcaagaaaattaaattcacataaaaatgagctacagaaaggtattgagatcaaattacatacaaagttattatacgagaaaaagggacagagtatctctccagacataaaaacttgcaatgaaaaaaatgcacacaaaatagaccaaaattataaccaaaactattatctatttcacaatgagttaaaaggcattaagaaaatgaggtaagacatgaaagaacaacgtgtatcaattatgaaaatgtgagaatgagatgacagagaaagttagaagtaaatgaaaaaaaaatgcagagctgagcctcaaatagragcaagacgagcaaatgataccatttgagaaaacaatcggcagtggaaagatgaaattttaaaaaataaaatagatttaaaagattcaagaaaaagtaacgataagaaagataggcaaagaagacaaatagtagaggtgcctgaaaaagaaaaaaccaaagcagcataacagaatgggtactcagtaaatattttttgagtgaattaatttattagctatagcatatagcatatagaaatgcatattaaaatagacatggtatattagtatgttgtaaaacagtattttttaaaaaagtgaaatgaagcctgggattattatgattattttttttatgaaacatagtgtatatacttatggggttcatgagatgttttcgtacaggcatgcagtgtgtaataatcatatcatggagaatggagtatccatccactcaagtatttatcctttgtgttaaaatctaattacactcttttagttgtttttaaattattgcctatcgtcaccctgttgtgctatcacatagtaggtcttattcattctttttttttattttttattttggatacaaggtcgcgctctgtcaccccggctggagtasagtgacgcaatctcggctcactgcaacccctgcctccccggttcaagcaagtcttgtgccttagccacccaagtagctgggattaggcgtgtgccactacgcctagctaatttttgtgttcttagtagacatggagttttgccgtgttggccaggctcttctccaactcctggtggcctcaagtgatccgcccacctcagcctcccaaagtccttggattataggcatgagccaccgtgcctggcctgtgtttttytgttctgtttgttttaatttaaatctttttaaaaatagagatgggtttttgccatgttgcccactctgatcttgaactactgggctcaagtgatctgcccgcctcggcctcccraagtgctgggattacaggcgtgagcccccgtgcccagactaggtcttattcgttctttcagtttttcttttatacccattaacctttcccacctctcccctgactccccgactacccttcccagcctctaggaaccatctttctattttctatgtccatgagttctattgttttgatttttagattccataaataagtgagaacatgcaatgtttgtctttctgtgctggacttattttacttgacataatgaactgcatttccacccatgtggttgcagatggcaggatctcattccttcttgtggctgaatagtactccattgtgtatataccacattttctttatccattcatttgttgatggacgcttaggttgcttccaaatcttggctattgtgaacagtacagcaacaaacaaaggagtgcagatatctgcgatatactgatttcctctctttgggttatattaacacagatagcagtggggttgctgggatcatatggtagctctatttttagtttgtttttgtttgtttgtttgtttttgcagttgcaagatttaatagagtgacatagagtgaaaacagagctcccatacaaaaggaggggacccgaagggggttgctgttgccggcttgaatgcgtgggtttacatcccgatccttgtccctcccactgtgctgtcaggcagtagatgattggctatttctttacctcctgttttgcctaattagcattttagtgagctctctgatcaggtgtgagcctaagttgcaagccccgtgtttaaaggtggatgcggtcaccttcccagctaggcttaaggattcttagtcggnnnnnnnnnnnnnnnnnnnnnnnnnnnnnnnnnnnnnnnnnnnnnnnnnnnnnnnnnnnnnnnnnnnnnnnnnnnnnnnnnnnnnnnnnnnnnnnnnnnnnnnnnnnnnnnnnnnnnnnnnnnnnnnnnnnnnnnnnnnnnnnnnnnnnnnnnnnnnnnnnnnnnnnnnnnnnnnnnnnnnnnnnnnnnnnnnnnnnnnnnnnnnnngtagatcttagtcatggactgcatctggggctccatttgaagaacgatttgtagttttacagcttcgattctggaagagacaaacttaacaaggaggttaaagatacagggattgggccgggcgcggtggctcacgcctgtaatcccagcactttgggaggccgaggcgggtggatcacgaggtcaggagattgagaccatcctggctaacacggtgaaaccccgtctctactaaaaatacaaaaaattagccgggcgtcgtgttgggcgcccgtagtcccagctactcaggaggctgaggcaggagaatggcgtgaacccaggaggcggagcttgcagtgaggtgagatcgcgccactgcactccagcctgggcaacagagcgagattccatctcaaaataaaaataaaaataaaaagatacagggattgaaatgtatggcctgcagtgcagattatttctttggcacactttacaggccctaactatctgcttgatagttttgaaaaggcctggtccagtaaataataatttggccatctgatgggtgctatcaatgcctaagtgaaaggtttggtgaagggttttaagtaatttccattggttagctgcaggcaaaagtatttttctttcttcggtggctagccatcctgaggggaggaaactatgtcctcgtgagcttccccattctatttcttcttctgagtactggggcttggtttcctggaggggattaccccatactaggggtccttctataagcatttctaatggagggtcctgccttgcggctcttttggcttcaatatcctcttggcggttcctttctatttcccgttcctttctgatgaccccggcagtgtaagactgccacctctttaggtttctgtacagccaataataatttcctaatggcttcctgatgtttgataggtgttccctccaaagttaggaattccctttctctccatattgctgcatgggcatggaggactaggtaagcatatttagagtctgtatatatatttaccctttttccttctcctaattctagtgcccaagtgagggctattagttttgccagctgagcactagttcctggaatgaggggattattttcaagtattccattatcactgaccactgcataccctgcttttcaaagtcctttttctatgaaggactttttgtatacgaattcattgtatgtatatgaatacgaatgaattgtatacgaattgtatgcgaattcagtatacaaattgaggtcaggatccgtcaagggaacctctgaaaggtcccctcgagcggcttaggtttgagcaattacttgttgacagttatgttctatcttttcttcattgtctggaagaaatgtggctgggttaagagttgcacaagtgcacagtcgcaacactggcccttcaagtaatagagcctgatatttaagtaaatggttgtctgagagccacaagtctcctttagcagtgagtataccattcacatcatgaggtgtccacacagtaagatctcttccctgtattattttaactgcttcagatactaagactgcaactgcagccactacctataaacaatgaagccaaccctttgccactacatcagttttcttactcaggtatgccacggttgcaagctcgtccctcggacctgtgtaaggactcctagagctattcctgtttttttgtgatatataaagaaaagtcttgccctattggcaagcttaacactggggcttgggttagggccttctttagggcctggaaagccacttctgcttcaggtgtccatcttactaaatgggtattggctttctgagtttccttaattagtgtatataatggtctggctattttgccgtacctgggaatccatattcggcagaaacctgttatgccaaggaaccctcttagttgctttagggtttggggatgagrataagcagtataggctggatacattccccactgagggccctggtgcctttggataattttagccctaagtatttaaactgctgtgagcagagctgagcctttggtttggaaaccttgtagccacaggtggcgaggaaatttaagagygcttgggtggcttggtggcacaaggtttctgaatgggcggccaaaagtaaatcatccgcgtaccgaaggacaagagtgtccaggtatgaaaattggctcaagtcttgggctaattcctagccaaatagttggggctatccctgaacccttggggtaaaacagtccaggtgagttaagacgttgggttcgaaggctcttcaaaggcaaacaagaattgagagtcaggatgtacagggttgcagaaaaaggcatccttaaggtccaggactgtaaaccgctctgcttcctctggtatttgggaaagcagagtataagggttaggtacagctgggtatagaggaacaacagcctcattcataatcctgagatcttgcactaacctccactgtctgttgggtttctgtactcctaaatttggagtattgcrggagctattgcatggttttactaggccttgggcttttaggtccttaacaatcttttggagtccttgttgggcctcgggtctaagggggtactgcctttggtagggaaaggaggtggaatcctttagtttaacttgaccaggatgggcattctttgctcgtccatgttgtctttctgttgcccagacttcaggattaattccttcctcaagcaggggacaacaaacgggtgttccttctcctatgttcaggtgtataatgacccctacttttgctagaatgtctctccttaacaagggagtggggctttcaggcgtaattagaaaagcatgtgaaaagagtaaagttccccagtcacaacttagtggctgggagaagtatctagtgactggctgtcctaggacccctcggatagtgacagatctggaggacagttgtccaggacaggagagtaagactgagaaggccgtgccagtgtccaggagacagttaacctcctggccctcagtggtaaagcatacccagggctctgtgagggtgatggcatgggctggcgctttccccgggcaccctcagtcctgctgctggatcatctggttcagcaggaccttcgtctcctgagaccttcgtctcagaggaccttcgtctcctgaggtagtgggccttccagtgattcccttgacataaggggcatggacaagggggcggcttatttctacttggacaatcttttttaaagtgtccttgcggaccgcactggaagcaagcccttttaggcattcgatttgcccagcttttcccttttccagagcctccaaagtccacttgcctaagggccatgactaaagcggtggcctttttttttttaatcccgtttgtcctgttccgcctgctcctcctgatctctattataaaaaaacaaggttgccaagttcagtagagtttctaagttttgctctgggcctaaggcggacttttgaagttttttcctaatgtctgcagctgactgataaacttgtcctttaagattagttggccttcaatggagtcaggtgacagggaggtatgcttccttaattcctctcttagtctatccagaaaggcagtaggattttcttcctttccctgtgttacagtggacatcattgaataattcataggcttcttcctagttttccttagtccttctagcacgcaagttagcagatgtctgcggcaccaatctccatgttctgattctgtgtcccagtgagagtctacactgggaactgcctgctggcctgtggggaatcgttctctttcctctgttgtcatcctatcattgacctaactgagataccagagattgccaaactctcgggctgcagttatggcggcacttctctcatttggggttagtgtctgatctagcagtaacattatatctctccatgtcagatcaaaggattgtcctaacccttgtaaaacatcaatatagccatcagggttatctgagaatttacctagatctattttaatttgctttaagtctgagacagaaaaaggtacatgcactctggctgggccgaattctcctcctcccactgcttggagggggcataatcggggaatnnnnnnnnnnnnnnnnnnnnttgggttaaaggggggtcccttgttagttggggaaggagtcggggggacactgggatagggaggtagactctgagggcttcctgtagggcataaaccacactttttacataattgcgagttgtctcttaatgaaaagaaagtttgcacatatggcacttcactccatttgccctcctttctacagaagaggtctagctgtaggatggtgttataatctatacttccctcacgaggccaggtttctcccccttgaagaggatatcgtggccaggcggtactgcagaagagtataagtcatttctttcttagtgtctgagggtcagattggtcccattctccagaatacatcttaggggcgtttttgccttgtgggggagaacgtttcccatctgaaaaaagaacagagggatgccagcacccctagtcattttccaatgagcattagtcctagagcgtcctgtaagggcctaatgcttattcttttccagggtgcgtaaccacccatggacctctgcttatcggattagttacgcttaccgatgtagcagtcctgcacctgttttcccgcctctcttgaccacaaagaaaagggtctggactgctggattctagtggtcctttaccagcgtgcccaaaattgcctttgtgctcaggggtgagttcctttccagggtgcgtaactccccacggacctctgcctatcggattagttacgctccccaatgtagcagtcctgcacctgttttcccgcctttcttgaccacaaagaaaggggtctgggctgctggattctagttatttttagttttttgaagaaccttcaaactgttcttcatagtggttgtactaatttacattcctgccaacagtgtatgagggttcccttttctctacatccttgctagcatttgttgtagcctgtcttttggataaaggccattttaactggggtaagatgatatctcattgtagttttgatttgcgtttctctgatgatcagtgatgttgagcaccttgtcatgttcctatttgccatttgtgtgtccttttttgagaaatgtctgttcagatcttttgcccatttttgattggattattagatttcatcctatagagttgtttgagctcgttgtatattctgattattaatcccttgtcaggtgagtagtttgcaaatacatttcttccattctatgggttgtctcttcactttgctgattgtttcctatgctgtgcagaagctttttaacttgatgtgatcccatttctccatttttgctttagtttcctatgcttgtgggatattacttaagacatttttgcccagaccaatgtcctagagattttcctcaatgttttcttgtagtagcttgtaaagatatgtagaaagaggaaagaatataggattggtggggaaaatagcagccaaatcatgcaggaccttttatgctattaaggatttgtagtatcctatgggtttaggtaaggaagcaatgtgatcagattatgttttagaaaaatagctaaactgtggtgagagagaaaactggaagcaagcagttctgttgggaaactgaggggcatggaccagtgtgggagatctgggcatagagaaaaggatgagattacctaagacagtggaaatggataagatggtaagattctagaaacattttggatgttaaattaaaaagaaaaatacctcagtgactaattggatatgggattggagaaggcagagagtataaaataaccttgaaatttctaacttgccaatgtaataactgagaagagaaactacattatcagtaatctctttgtatgggagcaaagttctactgcatgttctcactttattcaacacattggccaatgattaattattctttgtctttcttactagtctgaaacctaagagaatttttcaaatatttcttttctaaaaggaaaattatatggggtattttttagattataaaggtaatatatgctcattattttaaaaaattcagataatgcggaaaaatataaaaactattgtatagtctagaggaaagtaaaaagctttcatcatccatggttgacccctagtaacatcttgtttttatatactttctaacttttctatgcagatacgtatgtaaataaatatttcctataaataggatactttacctgctgttttataccctgcctttgtcacttgatgatatatattatgcatattattccatgccaaatatgaatctatttcataatttgtaattgctgtgttgaattccattgtatggatgtaccatcatcagttttctatttttatcttttctgtacaatactgccatgaatattttatgcttcatctttacaagttaatcatatctgattatttttcaggataaattttcaatagtagaaatcctgggtcaaagatacacgtttcaaattttaattcgtactttgtgattagttatgccaatttacattctagtcccaaactattgggtataaaccctatttctgtttttctagctccacgacttttctctaaaattagaatgctaaatatttatcttttaaggttgttataattaagtcagagaatgaatatacatatttagcccaatgtttaatacctaataattgcataataaatgccagccattgcttttaataacatgaaatatgtgcttccccaaagccctgttaatactgggtaacatcagtctctttaatttttactaatgtgggaaaatgatgtgttatttcaatgagaaattttggatggtgaacatcttttcatgtgcttattagacttatgacttttttgtttattcatttctgaattgctttccattttctgtgattgctttaaawttttttttttttttttttttttgaggtggagtctcgctctgtcgcccaggctggagtgcagcggcacgatctcagctcactgcaagctccgcctcctgggttcacgccattctcccgcctcagcctcccaggtagctgggactacaggcgcccaccaccacgcccagctaattttttgtatttttagtagagatggggtttcaccattcacagaatggtctcgatctcctgaccttgtgatccacccgccttggcctcccaaagtgctgggattacaggcgtgagccactgcacctggcctttttttttttttttttttggggggtggggacagtttcactctgttgccaaggctggagtgcagtggcatgatctcagctcactggaacctccacctcccaggtgcaagcgattctcatgcttcagccttctaagtacctgggattacaggcatgcgccaccacccaggctaatttttgtatttttggtagagatggtttcactttgttggccaggctgatcttgaactcctgacctcaagtgatccacctaccttggcccccaaagtgctgggattacaggtgtgagccaccgtgcccagtcaaaaatttgctctttttcttatatttcagtatttcagtattttttatgtgttagagatgttgacttcttttttttttttttgatacagagtcttgctcagttgcccaggctggagtgcagtggctcgatctccgctcactgcaagctccgcctcctgggttcacgccattctcctgcctcagtctcccgagtagctgagactataggcacctgccaccaagcccagctaatttttttgtatttttttagtagagacggggtttcaccgtgttagccaggatggtcgcgatctcctgacctcgtgatctgccctcctcggcctctcaaagtgctgggattacaggcgtgagccaccgcgcccggccagagatgttgacttctaatttgcaaacatttccctacgttttgtcatttttaattgaattatatatggcgctttttaaccctatatatgtaaaacaatacatttttagataactctaccatttatttgctttatgatttctggcttttcctaccctaagagtttaaaaatatttgtatgtaatttttttgttacatttcttacagtaaaatttttaatccttctggaatttcttttgttttagcgtaagatggagttttattttttatatactaaatttccattcaaaccatctgtttgataacttatctagggcaaatttcctttgattcttctttttgtttgtttgttttatagagacaaagggtcttactctgtctcccacgctggagtttggtgatgcaatcaccactcactgcagccttgaacctatgggttcaaagattctctcacttcagtctctcaagtagctagaacagacacgtgctgccacacccagcttaytcttctttttaatactcttcttggctattattgcatatttattctcctaggaaaactttggaaaatcgttctgtaaaatgtaaaaaaaaaaaaaaaaaaagtgtaaaaaaaaaatttgatcaagtcgttgatgctgaggccaggcgcagtggctcacacctgtagtaattccatcactttgggaggcctgggcaggcaaatcgcttgagctcgggaattcaagaccaacctgggcaacatggctggtattttttcatacaaaagatatgaaaattagcgtgtgaaaaagatatgaaattatcacgtttgttgtcatgtgtcagtggtcccagctacactgaaggttgaggtgggaggattgcttgagcctgggaggtggaggctgcagtgagccgagatcgcaccactgcactccagcctgggtgacagatcgagaccctgtctcaaaaaataaaaataaaaataaataaaatacccctgttgaaaagtcacactgagattttcattgaggttttcagatttcttggaataaacagtaaatcttgagtgcactttaaaactctcatggttacaactgtcatttcagttcagcctgtcagtaagaacattccagaatttttatgttatgcttgtacatacaatactatataaataggtatttcataaaaatatgttttgatggtgttcattgattcagagaccaaaacttttcactcccaaaactcaaaggcatgccattttctcagtagcaggaaaatatattgttacttgtacgtgttgtaaaacttgaattactgtttcagaagtgatttctattatgtttatacaaggaaaaaattcaaagtaatttactttaatgaatatgtaaggcagactctattctaagattcttttattacagtacaaaatataactctttagttttacccatttcagttccatcttaatgtgtatttgtttcagtaatgttccccttcctcacaaacatttactttttttatttttagttaaaaaaatttttgttcctggtgggaccaagagttccaacacaaacatttaaatagaggaaaaataaatgagagagccattaaggtcttcttataaaagcagatgtttgttattcggagcttacaaattattaacccacatatcacaaacaagaaatctgtttttcaggtttcagtttcataaatttcttggcataatctaacattttaaaaattaatataaccaatcagtgactgcttcagtgaaactaagtatacaattaggctttacatcatatgttaaatgtttcagtaaccatgtacaaacagccttttgatgtaaatgggctttttgttacccattatagaggaaattgaggttttgaggagttaatgtcaaatggtaggaaggaacgaaactaatattttgagtaccaaatgaaccaagcactttatttggtgttttcttggagcttattattttgaataagtagattattttctgacagtaaatttgatcaagtcattggtgcattatataaaaccaaatttgtcaccatattaccaattctttactttttgtattcatctgtgattgtttactcagtttttgtataatagaatacacaaatcctgcttttcatcattgaataatcacttttccctgctgcttaagatatctgtagttgattaaaataaatgatctcaagcatttttctttgtttttcagattcctgaatttgacaacttgtacctggatatgaatggaattatacatcagtgctcccatcctaatgatgatgatgttcactttagaatttcagatgataaaatctttactgatatttttcactacctggaggtgttgtttcgcattattaaacccaggaaagtgttctttatggctgtagatggtgtggctcctcgagcaaaaatgaaccagcagcgtgggaggcgttttaggtaaaacatttatgttttattttggaatattatttagcttagtaaaaatatgttattttaaagataattgatttaacacaatcttctgttcatgtttattttctgcgtaaactcccccagaaatggaaatatctcagtgtcatattttaccagtcgagtaatgagttaggaactcagtgagatgtcctttctcaaaacatatgttggaggttctcttgttcgtttgtttgtttgtttgttgagacagaatctcactctatcacccaggctggagtgcagtggtacagtcttagctcactgtaatatctgcctccccagttcaagtgattatcggtgcctcagcctcttaactagctgggattacagccaagcgccaccggacccagctaattttttatatatatatataaaataaattttatatatatataattaattatatatataattaattatatataaaataaattttatatataaaacattttatatatttatatataaattatatattatatattttatatatatgaaaatatatttatatatttatatataatgtatatattttatatgtataatttatttatttttgcatatatatatgcaaaactccgtctcaaaaagattatatatattaaaaatatatatatttatatatatacaatatattatataatatatacaatatattatattatatataatatattatataatatatacaatatattatattatatataatatattatatatataatatatatattatatataatatatataatatatatattatatataatatatatattttttaatattatatataattttttttttgagatggagttttgctcttgtcgcccaggctggagtgcagtggcgcgatctcggctcattacaacctccgcctcccaggcacaagtgattctcctgcctcagcctcccaagtagctgtgattacaggtgcccgccaccacacccagctaatttttgtatttttagtagagacggagtttcaccacgttggccaggctgatctcaaactcctcacctcaggtgagccacccacctcagcctcccacagtgctgggattacaggtgtgagccaccgtgcccagccaatttttaatatttttaatagagacagggtttcactctgttggccaggctggtcttgaactcctgacctcaagtgatctgcctaccttggcctcccaaagtgctgggattacaggtgtgagccaccacgtctggccaggttttggtgtcacctggggctctaagaatacatcactgtagttacagttcagcaattaggaagctactgctgcatctgttagttcccaagctacagtgcagttgctagatctgtactgaaaaaaactgattccctgttccttgcttataaagtcacacttttgttttctgtcacaagtttttatacttctcattgataatttgcaaatgatagtactgtagtagagaaaagctccaatagtagtctgccctgggatggtaactagaaagtgaactaagaggttcttctaatgagaacattattgacacttaattcaacaaacgtgtattgaatgcccagactctgggttagatgctgatttttgactgagcataagtccagattgggcagaaaggcaagtgagatcagaatgcaattgatggactgtgagaagtgagctaagttaggaaattcagggtattatcagcaccactgtgtgacttaggcggtaggagaagtaaaaggatgagaagaggttacacactaggattttaaagttcattcctggacatgtggaatatttctgtgtaacagtgagatcaggctgtgtcccggttcatgggtaacagaagtaaaggttagaattgaaggcaagaaatccctagtggagagtgtttgacgggtcattagcataatgagtccttcaatcataatggcaagtaaaggagtggaaagaccatctgcacatccaatgtggaagtcatcaaagaaggtgggacggtgctttgaagaaggctgccggtgagaggaagaggatggcaaaaagtactgatttcaatatcaaaagaaaaaagatactgaaatttttagaaagactgtgagatctttgaaggcaagggccatctctgagtaatatttaaattctcaaataccacccaagacttactctatcagaatctctagtagttgagaaactcctgggaactattttttaccatactcccctggtatttgttaaagtagtttttgggagccactagcctagaaratctagtgttaaggagggattttataaacctactacatcagtctgggttcagttgcaggtgatagaaagcactctagctatttcagacaaaaaggggtgtaattcagggaattgggtgtttataaaaatcactgtaaagccaaaagggcgggaatctaggtgagccgtaagggataacttcccaaacagcactacagaactgactcaccagtggcagaactattaccacattcaggtaacgtgaggagttcagagccccctaccaaaatgggtggtttcgggaacttactcctttatctgtgatccaataattaagaagctgtcacttggggctctaagaatacatcactatagttacaattcagcaattaggaagctacagctgcatctgttccagagctacagtgcacctgctagatctgcactgaaaaaaactgattccctgttccttgcttatcagcacctctaaagatactgaatactgggatcttctttaccattgctgaaatatacagacatactagagctccagtgcctcaattgtgatgcaggcaccaccacacttccactttccaaaccttatatggaggcatctaattggcaaaatctgagtcatatgaagacacttagcttcagggaagcctgagaactttctaacctacctggtgtcagaaggtaaactaaaaggaaatggaatggaagttgagggccaatgcattataaccaccacaagcatttattaaatactgtgctggtattgagcactacatttttcctagaaatcccctagtcagttttctgccattctctacagtgatgaccttctccattcataattccctgttttacttatttctaaatctgccttcttttatccccaccatgccactaaaatttcctgacaagattacggctaaatccaggccgggcgtggtggctcgcacctgtaatcccagcactttgggaggcccaggcgggtggatcacaaggtcaggagttcaagatcagcctagccaaggtggtgaaaccccgtctctactaaaaatacaaaaacaattagccaggtgtggtggtggtcgcctgtaatcccagctactcgggagggtgaggcagagaattgcttaaacccaggaggcggaggatgcagtgagccgagatcacaccactgcactccagcctgggcgacagagtgaaactctgtctcaaaaaaaaaaaaaaaaaaaaagattatggctaaatccaaagaatacttctttcttcaacttatttcatttatccacagcatttaacaatgttgaccattctttcttgagcttctccctttccttgaccatcatgtaaccacattctctctttgtactttcttagtctccttgtcttcttttcttcctttgtgtttcttaaatattaatgtttcttaagtttctgtcctaggctctgagtgatttcatccaatggctttgattactatgtctctgctgatgactccaaatttatctttctggtggatcgctttctcctaagctcctatatatccaaatgcctactaaatgtctccttttggaaaccccagatatacttcagggttaacatatttagaactgaactcatcttccccttaaaacagtctgccttctgtgtttcctatttcaatgaatggcaacacctgccactagctacctaatccaaaagtccaagagttatttggacttcttgctcttcctcattcctcacatccagtcctctttatccagtctcaaatttgtcacatctgtctacttcttttcatctttaatgctactgtctcagcctagactaccattatcttaatctagattacttcaatagtcttaccttgttcctgtcaaacattttctttattgcatccagattaaacattatggctgtttaattttctacctccccactagagtgtaatctcagaacagaaataattttttttttttttttttttggagagtcttgctctgtctcgcccaagctggagtgcagtgatgtgatctcggctcactatggcctctgccccctgggttcaagcgaatctcctgtctcagcctcccaagtagctgggactacaggccgcaccaccacacccggctaattctttttgtatttttaacagagatggggtttcaccatgttggccaggctggtctcaaactcctgaccttaggtaatccacctgccttggcctcccaaagtgctgggattacaggtgtgagccaccgcacctggccaagaataatttctcttttgttatatcccaagaccttgtgacataacaacattgaataatcgtttggtcagccaaagaaggaagggaagaaaagaggaaagaagacattgcagataatacaaacaagttgatatcctcagagtttttgttatgttaaagaggttggtgagagagaagttaaacttgaagaagagtttgttcatcacagaaatagaattgtgtggggcacagtagatgaagctagtagcaaggctgtagaaactatactcaaagcagagcttcctaacttgtatgccatgtggcatgctggtacgctgcaaaggggtggcagtagaagtcaggcaggtagtaggacacccatattcaaatccaggtttgcctgactgtaaaactcaggttctttctagtaaattctgttgcctcaaaaatgtgatgattttgcagttgatttcattaatgtcattaggctttcattttaaatgtttttaggaaacacaaagatagatatttcaattttataattgcatttttatataatcttagggataattttaatgatcttaaatgtatacattaaatgatgattaagatcattaaatgtcattatcattagatgtagtatatataatgaacatttaaagctatacttttgatcttatttttagaatgaatttgccatatatttgtgacaagaattattttatgtttttaacattctgttaaaatgttctacttctgtattcctaatccgaaaaattcaatttttttttttttaaatgagacagagactcactgtgtcacacagcctggagtgcagtgggtacaatcatcactcattgcaatcttgagctcctgggctcaagggatccttttgcctcagcctcccaactagctgagactataggcacatgcccctgtacctggctaataattttttttatttttgtagagatgggatcttgctttgttgcccaagctggtcttgaactcctagactcaattgttcttcccaccttggcctcccaaaatattgagattacaggcatgagccactgcacctggcctgaaaaattcaattctttaaataaacaaaacagacaagtctggggctcatttttatcaatcataatcatttcaaaacttgtatgttttgaacgttaaaactggtgaattactattttagttataaaggcacctacatagcagtttatataaagatcttcactttttttcagaaaacttaaggtacttttttcccttaacctttaaggtcagcaaaggaggcagaagacaaaattaaaaaggcaatagagaagggagaaactcttcctacagaggccagatttgattccaactgtatcacaccaggtaaattcactgagagacaaattatgacagaattgaaatataaattgaaaacttggtttttaaatgtattttattttctatgctctatttattttggccttagggttccatttactgtattttcccacttatgtttgctcatgagacgatttggtcaccttggtcataaatactcctacaaaaactgtagggattttcagatgtagataaattagagcagatatggacaggaatcttcccaggtggacagaattgcagacctgaagaaacttatgtttatatatctttctgtcctattcctgccatttatttatgttaaaacagactcagtgaggttgtagcttatcaagttgatgtagctagattgtggtagtcagagtaagaaactgattctcctagtccagggcacttactactctgcttctcaaaattagttaagatttttatgactttaaggaaaatgaatttatcagtattatgtttaattttgtatgcagcagcatactctatatacttctacaacctttgtctaacatcatataattctttactttgaatgaaaatcttaaaatctaactttctcatcagttctttactaacagtggtaatttgccctttctttaagtgcattggtcacacattgctcagtttaacaaccggttttatcctgattgtggttttagactgtattgcttttgactgttgaccatctgagcctttcccaaaatgtaatcattgtagactcaggttccaaattaataataatttttcagaataataatttcagtagtaatattattattattattgacaatctgatttaagctgcaagccttaaaaaaaaaaaccttcagaattcagcagaagaaatagaaggttgaggttcattagagatctcaaactctgcccttacatgaaaattcctgaagcacagtgctgagacactagtaaaattccttgactttccctgtgtgacactgattctatttagggggactagtgacattagaaacagttgtgatatttgcaagggaaaagtacattacttgtttttcaggataagcaagagagcttttgaccttctttggagatcctatacctacctagctattcccggcgtactcagattcagttatgtgttgtcactgagaacttaatgtttttatgtctttcttagattaacctttttaaaacattatttttaggaactgaatttatggccaggttacatgaacatctgaagtattttgtaaatatgaaaatttccacagacaagtcatggcaaggagttaccatctacttctcaggccatgaggttattatctttttttatttaaagagtttaaaaaaagtatttaatattctcaagcatataccatattactgcatttttaaaaacaattttatttagactcctggagaaggagagcataaaatcatggaatttatcagatccgagaaagcaaagccagatcatgatccaaacaccagacactgtctttatggtttagatgctgacttggtaggtataatttttattattataaacttatgcattgatagttaaatatctaagagatttcattttgtacaggaagcttactggctgtggcaacaaatattggagacacaataatgattgctacttctatcattaccaaatttctaaaaatcattggaaaatgagctttttaaccatagtttattgaccaacagatctctataattagtctacaggtgtgactaatcctagtgctgtgaatactttgccaaggtcagagaaatggggctgcttttttaccctcaggcttaatacttggcttttaatacctccttatctgaaaactccatgctccagatacctttagtagactttttttggcattaactttttattatggaaattttcaagcataaacaaaaatagaaaaggtaatataatgaacatcgtatacccttcatctaacttaaataattttaaatttctacccctaatcatctgtctcctctccctcctacccactccccgcccgattattaaagcaaatcctaaacattttatcattaatttgtatatgtttcataatgtttctctaaaggattaaggtgtttttttaagaaaaaatatataaccacaatgccatcatcccacctaaaacagaaattaaccttttcttaatatagaaataaccagttagtattatcatttccctgattgcctcataaatgtttcattttgttttcttgtttgaatcaagattgaaataaacagtatgcaagtacatggcgtttgattgatatgtgtcaacagactgttgacttacttggggtattagaatactgtgtgagaggccgggcaaggtggctcatgcctgtaatcccatctctttgggaggccgaggcggccagatcatctaaggtcaggagttcaagaccagcctggccaacatggctaaaccccatctctactaaaaaatacaaaaattagccaggcatagaggcagatacctgtaatcccagctactctggaggctgaggcagggagaattgcttgaacctgggaggtggaggttgcagtgagccaagatcgcgccactgctccagcctgggcaacagagcgagactctgtctcaaaaaaaaaagatactatgtgagaaaattaactggaagtgctcttttccatttttttttttcctgagttttcatatactggggctatcctggtctccaaaagagtcctgcattctttggtcatagaaaagctgctgcctctaatttctaaccagttcccccacggcaagtagaaatatgtgaaaaccaagagaagatgtttgggatttggagggataggaagaggagaggggacaggggatagggtaatggttatgaaaagcatgtgagctaaggtgaacatatttttcttagaaaagtacactttatctcattcattacctacaaatagatcatattttgttatttgtatatttaatgtgctaattgtttcttattcttccttgtatagaattgttttttaattgcttttgtgaacctaatattattaaaaatgggagaataaaaacatttcttaatcatttttcaacagattatgcttggattaacaagtcatgaggcacatttttctctcttaagagaagaagttcgatttggtggcaaaaaaacacaacggtaaattatatagcatatatgttggaagaaagaaattacgcctggatagtaattctttaacagatacatgtttgtaaatactttatctcattccgtaggttgccttttcactatgttgatagtgtcctttgatgcacaaacgtttttaattttgttataatccaactcatttattcttctttttttaggagttttcaagttttaacttttatggttagatctttgattcattttgagttaattttagtgtgtagtgtaaggtaagggcccaacttcattcttttgcatgtggatatccaatcttccttgcattatttgttgaaaagaccagccttaaatgggccagatctcagtagtttcttacttctactatatgttatttaggacttcttaattctgagaatccttccacagaacacataatgtaaaccaattgttttgaactttaacatgtattatctattattgcaattgtatttttatctttgttaccctgcaaccttcatataaattgtatgccttaattacaagaccttactatcttctgatgatacttttgatttaagctttgttacatttttaagctgggaccttaaaaataaaattcactgtatcttgatcatctgactaattccagggtatgtgctccagaagaaactacatttcaccttctacacttgtctttaatgagagagtatattgactatgagttttcagtattaaaagtaagtattaataaagccatggaccaaggatttccattgcagaaattttcactggatttgactttgttctctattttactgtaggaaaagatcacatttaaatatgatattgaaaggataatagatgattggattttgatggggtttcttgttggtaatgattttatccctcatctacctyatttacatattaatcatgatgcactgcctcttctttatggaacatatgttaccatcctgycagaacttgggggtaagaagaatttaataatctctcgaggatactttaatttagtgccaccttaccctaaaaatgtgacttagtttagtagattattgcatgcacgctaaagcagaaaaacattgaggatttattttggtctaaggtgctaacctctgaggttgtcattttcagtgattcacaaggaaagaaagtgaacagagttaacgaacctcaattattgatatctaactaatctttgccttttttttattatttatttattttttgagacggggtcttgctctgttgcccaggctggagtgcagtggcgacagtgcaacgtttgccttctggattcaagctatgcccatgcctctgcctcctgagtagctgggattacaggcatgtgtcaccatgcccagctaagttctatatttttagtggagatggggttttaccatattgaccaggctggtctcaaacttcggcctcaagtgatctggcttcccaaagtgctgggattacaggcatgagccaccacacccggtctaatctttgcctttaattccttaagaaagccagcatactttattggttttacttttttcatatttaagcatagaaattcaatttttttcgaatggatatgcatcacagtgtttattatgaagcagtgatttttcaatgaaaacagaaaattgacaaacatagtgatgccaaataaaacagaccacagggtagcagaacatcagtccttaagttaacatatcatattaaatgatctagatagattatagaccatatttaatttaattaattgttaccaaatgttggattattatgtggaacctggaatttcttatatttggctttggtgcttacatgttgcatattatagtagcataaaattcacagaaactagggccagtttggatatagtccmacactgttttttcttgattagtactgtagaacatgracattcaacattttgtagaaagagttttgtagaattgtttagaaaaaatgtcagcttttagtacagatttaaatttttgtttcttttaggttatattaatgaaagtgggcacctcaacttacctcgatttgagaaataccttgtgaaactatcagatgtaagtaactagaaatttttggtttcctgtcgcagagtagctgtaaatgatcagtcaccaattatgtaataccagaagaaaggggttttataattctattccaattgcttattcaatataaacacttttacctaaattaattttatttttatttgctttctatttgtatttttagagtaacacatgaggtctcccatatatataaaagagtaacattctccaatttcctataccccagtagtagtcactgttttaagtttgatttgtattcttctagatatacttaaattatttaaaaataaatttaaatatttctgtacagtttgatcgggagcacttcagtgaagtttttgtggacctaaaatggtttgaaagcaaagttggtaacaagtacctcaatgaagcagcaggtgtcgcagcagaagaagccaggaactacaaggaaaagaaaaagttaaaggtgtctatttttttaggtgtcctttcattgttttaactgtaaaggcaaaaattatattctttgtttctcattttccttcttatgatttgggattgcctcgttttatttctcttcctctctataggcatttcagaaattgatttggtttctttttttctattagcttctgtcatttaatgagatcttcaataatcagttccttatttttactgttgaagaggtacattgtgttttatgttaataaatgtggaaaacatttctaaacataaaagcccagaaaatgaattattttctgggctttttaaaaaaattacttaaaacatgttattaaaaacaattatttaaggccaggtgcagtggctcacacctgtaatcccagcactttgggaggcaaaatgggtggattacctgaggtcaggagtttgagaccagcctggccaacgtggcgaaaccccatctctactaaaaaaacagaaattagttggatgtggtggcacacacctgtaatcccagctacttgggaggctgaggcacgagaatcacttgaacctgggagacagaggttgcagtgagccaagactgagccactgcactccagcctggctgatagagtgagactctgtctcataaaaaagaaaaacaattatttaaaacctgacagggaggataccatgatcatgaaggtagttttcccagggcgaggtttatccattgcactctggatgtgctgatgccctgcgatttcgccaaatgtgggaaactgaactgcgtgacttatggtagtggaggactgcattcacactttcccctggcaatttttttttaattaaaaaaaaattgttattttaaaacaatggactagtttttaaaatgtggatatttatagtgtttaatgatatgagacattaactagatcagtgatttttctctagaaatgatttacatataaaatacaatagtctaagttaatagtaatggcaaaaaccacaattacttttgtgccagcctaatagcacaatatctagtaaatgttatgtgcttaataaatgaataatagaatcaattagaatatgatagtaccctgcagagcatctctgataatctccaaagaatgtcttgtgttaacttgaaaagtaaacctcttgtgaaaaattcttcagcctctctgtaattattggattctgctgagtttcttttttttttttttggagacagcatgtcactctgtcactcaggctggagtgcagtggcgcgatcttggctcactgcaacctctacctcctgggttcgcttgaattcccctgcctcagcctcctgagtacctgggattagaggtgcgcgccaccacccagctaatttttgtatttttagtagagacggggtttcactatgttggtaatgctggtctcgaactcctgacctcgtgatctgcccaccttggcctcccttaagtcctgggattacaggcgtgagccaccgtgcccggccaagattctgttgagcttcttactctccttgctgtactggttctatttaggttcaaacttaatgactcttgctccargaggggcaactgtccttgttttctctagtgtagtccttctcgctgcttagctcttcctcactggaacttggcagcagtcagtctgcattccactggtttttgtgtgtgtgtgtgtgtctttttttttccccccctaagaaaacgggctctgcaactttttgggaacctgtacacacaaaacttacctgtcagtaatccctggctcccccaccacaattcagtacttaaacttcaccagtcttccagccatatgcagctaactttagagacactgtgcaggaatagcccagacacaggaagttggtagaggccataagttggatgaaagaaaggaaatggggataagggagtaggaagaactaaagagagtcattggcagtagacaggaaatcagagaatagaggagagaaaggattgagatcacaagggaggaaaaacagatgggcaggatatgaaggatgttataacatggaagaactatagaaaagcaaatgggtgcatggaagagaaatgacatctcattttgaaatgtatcttgccattcattttatgttgatttacaatttacagggccaggaaaattctctgtgttggactgctttagacaaaaatgaaggcgaaatgataacttctaagggtaagtatgaagtatgtgttttgatatgttactactttgacaggataattgttataccttttatttattattactaattttgggtggaacagatttctgtgatagcatataagcatcaacttggatatgcatttatcaaatcattaggtggaaaaacaggctattcataattgtcagtcactatctttctgacttttttccccagataatttagaagatgagactgaagatgatgacctatttgaaactgagtttagacaatataaaagaacatattacatgacgaagatgggggttgacgtagtatctgagtacgtttttgccaatgcttttattttaaaatagaaaaaattagattttgcagttattcagaaaatatgattttgatgaagtagtgggagaaaaaggattttttggtttcatgaattattgtgtatgtttcaactagtctggttttggagaagatggtattaattctgacttgtattatattcctgtgataaaaattgctgaagagaaaatgatccttatgtataaggatttttgttacaaagttgtttataatagtaaaaaaattagaaataatctaaatgtccaataagaaggttcatcataattggccactgcttcttcattacagtcaccatctctgtcacctcttccatctccggaatctgcagaactgctaaactggtacttgcagaaagttcataacaatttggaaggatgcttatagtacattattaagtacaaattgtaaaggcaagacatgaaatcatacatacagtatgctctcattaaccttaaaaaaacctagatatagataaaagactgaaacactaaaaatgtaaaagtgatggctataagatgataaaaatgctgttcttcattgtccagattttcactcctgaggaaatagttcttttataataaaaaagcaatatttttcatattaaaaaactacctcccagaaatatgtagttatgtaatttctaagtgaatatttttgcctttagcccagggctctgttttgttttgttttgatgatttgaagacttattttacccaaacttagaagatggcatttggtttttgacaaagaaaggattagaaggaatattgttcacatacagcacttctgaaagcattctagcttctgtgaccaaattttaagatcttcctgatttgctgctttgcttctctcagatatcatcccatgtaaagaagattcccatccctttctcccgtctcacccccactatttaagagagtggtagtgtcactatggaaagcttcattgggtaaatcttcaacctttggaccaagggagtggtacattaactgagtaaatatgaataacagacttatctattttgatagttggtttaggaaaactgtcatgtgacaggatgtaatttttaaaaatattttggagtttttaggattataatttttagccataaatagctaattcattgattaaataaatcatctgaggtaaaatgttgtatcagcagataccgtgctctaaagacacgggcctgtcttcagaaaatatgttataatgaaaatattctattttcagtgactttctggctgatcaagctgcatgttatgttcaggcaatacagtggattttgcactattactatcatggagttcagtcctggagctggtgagagaataaaaacaaaaataaagttttgtctttttataatgattcattctactagagtcttatttaggaagcacttccttttatttctacttatggtaattttttttttttttttttttcactctgttgcccaggctggagtgcagtggcatgatctcggctcattgcaatctccgcctcctgggttcaagcaattctgcctcaaccccctgagtagctgggattacaggcatgcgccaccacggccagctaatttttnnnnnnnnnnnnnnnnnnnnnnnnnnnnnnnnnnnnnnnnnnnnnnnnnnnnnnnnnnnnnnnnnnnnnnnnnnnnnnnnnnnnnnnnnnnnnnnnnnnnnnnnnnnnnnnnnnnnnnnnnnnnnnnnnnnnnnnnnnnnnnnnnnnnnnnnactgcacccggcctctacttatggtaattttttaaaagttccatacaaccaggtttaaatgaaacataggtaatattttctccagccctaacagtaaggctcataataagaggtcttagttaatgtaaagatttaatgttctctatcaaagttagtcaagtttggcaaagtcttgataattactgggtttgagtgatggttatgtgagggtgttcattatattctctttacattttttgtgtttgctaaaaaattctctatcaagaataattattgaagtgttcgggcacagtggctcatgcctctaatcccatcgctttgggaggccaaggtgggcagatcacttgaggtcaagagttttgagactagcctggccaacatggtgaaaccccatctctactaaaaatacaaaaattagctgggcatggtggtgtgcctctgtagtcccagctacttgggaggctgaggctggagaatcgcttgaacttcggaggcagaggctgcaattgagctgagctgagatcgcaccactgcactccagccttgggcagcagaacaagactctgtctctcaaataaataaataaataaataaacagaataatcattgaaaaatgggcttacttctaggaagggctagaaaggtgaagaagaaaagagaaaggagttctttttttttttgagacagagtctcgttctgtcagcaaggctagggtgcagtggtgcagtcttggctcactgctgcaacctccccttcccgggttcaagcaattatcatacctcagcctcccaattatttgcttttatggagaatagtaatcattttatttctcatgtttcctattctagcaaatcccatctgcattttcaaaccatccaccaaagtagaaaaattmaaaaccaaaaaatgatacagtgaatactagagacttttagatgataacacaactctgtttggtttggttttgttcaaagcacctgtgctaggctctgtttcagagctccatctagcaatacaaaccagtgcaaaataatgtgacattaattatggtttcacttactacataaagcctttgaaaaaagttttataatcacctgattctcagggcctctctgaggagcaatctcatgaagaaaatccttgatttgccatttttaaaatagtgtgaatgtaagttattcctgttgtaacttacattaaggccaagcacataaaaagcatgctctcacataatcttcacaactatttaaagtaaacattgttttctcccttttacagatgaagaaattgaggctctgaaaggttgagaaaggttaggtaatcttcctaaagattatacacccaagaattaagtcaaagcctgtctgattccaaagtctaccctttttctattccacatggcacttggcctcctaaactcctccattttttttgaaatgtacgccataattatggaatacaaaaacatttcaatgtttttggtatcctgactcaaacattagaagcatattgaaatttttaaaaattgtttgttcaaagctttataaaatatttatacctgtaattaagatgagaaggtaataaaaacaaaaacaattagtgtatgtgatcgatacatggtttcatccttatcacaaatacaataataagcatgctaattcaaagataaaagttcttagatctgactggtaatggccagataacctcagactcacttttcttcctctccttgtgagcttttaccagaacgttcaactgtttttagtctcttgcttaaatgatccaggctcaagtgaccaaactgaaagtcttctgactacctcattatttctggttcaatctattgattggaagattcactatcaacattttgagaattaaaaaaagcattacattatacgtgtttttcaattacctgattcatcccaatttcagaaatgtgaaaccacactttaaaaattcaggaaataggccaggcgcagtggcttacgcctgtaatcccagcactttgggaggccgaggcgggcggatcacragatcaggagattgagaccatcctggctaacaaggtgaaaccccgtctctactaaaaatacaaaaaattagcctggcatagtggcaggcgcctgtagtcccagctatttgggaggctgaggcagcagaatggcctgagcccgggaggtggagcttgcagtgagccaggatcgcgccactgcactccagcctgggcaacagagcgagactctgtctcaaaaaaaaaaaaaaaattcaggaaatgtaacatttgttgccatcggatgacctaaattttccaacactgctaatttcttatattcagatagtagaattatgggcagtactaattttttaaaattatttttatatgttrttaaaatayggggaaaagtatatgtttattattaacctaattcataaagatgccacttgtttaaaactcagttktgttttataggtattatccttatcattatgcacctttcctgtctgatatacacaacatcagtacactcaaaatccattttgaactaggaaaaccttttaagccatttgaacagcttcttgctgtacttccagcagccagcaaaaatttacttcctgcatgctaccaggtgggtcttagaattgaatgtttttatgtcctttttgatatttagaagctcttcctccaaacctagaaacaataatactcaaatttatttggtagctaagtagttattttcagttttaaaccatagtatttttttaacaagtcccttgaaaagtaattctttgatttcaagttagctttgttttaaagatgcaaagaaactcygtaaatcattcagagcctggcttcgttttcagcacctttaaacagattttcaatttgtctctacactgaagaaagtaggctaaaaccgacaaaatctgaagctatctactttatctaaacatttatagattcatttctcttccctttactgtctacattttggtatagggatggttctaataagtcatttatcccaacagcagtactacctcagtatatgtttgtttttaaacattttatttatcaatttgtgaaataaaaagctttctttggttaacatatttcatgtaacaggaggaaaatatttcaggagttgataaggttaccaaaattacgctaagcctactaaggtgattctgaagttatactttgtatcgttctttgagggtaacaatctgttcttttaattctgtggtttggtcaggaattggagtagacacacacaccccctttacttctttagcagtgtcagactcccttctgcatctttctgaaccttaaactgttgttgatcctggcttccctttcttcgtaagtttctttgattgttttttccctgcctttggatacaatacgctttaatacccaaccactctgaaccagcatgaccatgcgttttacggtctgttttatcgtacagtgcccatgccatactggttattttaaatattttgaatattaccctgagagtatactgccttatttccttatgctttctttgtctacctccgttataaagtcatagaaatgtgttattggactatttctctttgatattagtggtgcannnnnnnnnnnnnnnnnnnnnnnnnnnnnnnnnnnnnnnnnnnnnnnnnnnnnnnnnnnnnnnnnnnnnnnnnnnnnnnnnnnnnnnnnnnnnnnnnnnnnnnnnnnnnntttagatgaactgaaatgaagtctgaatagaaaaacaatttagctgtgtgtcttgtagagtgaaaaaacaagaaaaaataatttaaaatgaatgttgagagtaaggatgactttgctgcataactaagtcagtaaaatgtataaatgatgagtagtagtgaaatcagaattcttatagttgaaaatcaaaatatagcaagtatattgtgacatatcaaaggtacaaaaatttagtttgctttgcttagaaattttaaactaacatgaggaaatattataaatacattaacaaaaaactatattgatattagttcttatatttctattatactatttcatattttcacagcatttgatgaccaatgaagactcaccaattatagaatattacccacctgattttaaaactgacctaaatgggaaacaacaggaatgggaagctgtggtgttaatcccttttattgatgaggtcagtgcatgaaataatcattacatacacatacattcttaatcagagactatttcacataggttaatgagcaatgggttttaatcaccatttatgttttgttaatgagatttagctaccctcttcattatgtgcataaaaacttccaggtatgccaattataataaggctgaagtggctttactattattagacaaagtagtcctcagaacaaggagtaatattaccggagataaagagatattttatacagataaaagagtcagttcagttcaagaagacataaaaatcctaaatatgttgtatctaataacagaacctaaaatacatgaagcaaaaattaccagaattatagctagaaatttcaacacttttctctgaagaattaataacacaagaggacaaaaattcagtaaggatggccgggcgcggtggctcacgcctgtaatcccagcactttgggaggctgaggcgggcagatcacaaggtcaggagatcgagaccatcctggctaacacagtgaaaccccgtctctactaaaaaaatacaaaaaattagccgggcaaggtggcgggcgcctgtagtcccagctactcgagaggctgaggcaggagaatggcgtgaacccccgggggcggagcctacagtgaaccgagatcgcgccactgcactccagcctgggagacagcgagactccatctcaaaaaaaaaaaaaaaaaaattttcagtaagtataaagaagatttgagtaatgctataaacctactcatagaattaaattagaaatagtaacaaagatctgggggatccccatacattttgaaactaaatagcacacttctaaatagcctatgatgaaagaagaaattaaaagaaaaattagaaaatatttttatctgaacgataattaaaatacaatacatcataatgggagctgagcatggtggcacacatgctgtaatcccaacactttgggaggccaagacggtaggattgctttttttccctcaggaaagaaaaaaaagggatccatggtcagtatgatacgactaaagcagggcttaaaaggaaatttaaggttctagacgctaaacaagaaaaaggtttaaaataaattacctaagcttctaacttaagaagatagaaaaagaagagcaaattaaactcaagcagaatgaaggaaataaaaagaagcagaaatctacagaaaatgaacaaacaatggagaataattaatgacatcaaaagttggttctttgaaaagattaataaagtcagtaaatcctacctagactaatcaagaaagttaaataaaaggggggaaggcagaaataaattaccaatattgggaatgaagaggagctatcttatagttccttcatatagtaaaaggttagttaaggaatgttatggtcaaactttatgtcaacaaattcaacaacctagatgaagtgaacatatttcatcacaacttatcaaaactcacagaaaaaaatataaaaatctgaatagtcttttgtgtattctaggcccagatgtcttcacttgtgaattctagcaaacatttaagaaataatgccaatcttacacaaactttcagaaaacagaagaaaggaaattgcttcccaacattttattagactagcatattccagagacccaaatttgacatggcattaaaagaaatgaaaattactgactgatactcctcctaaaagtagatgcaaaaactcctaaggaaataacatgaggccgggcacggtggctcatgcctgtaatcccagcactttgggaggctgaggtgggtagatcatgaggtcaggagatcaagactgtcctggctaacaagattaaatctcgtctccactaaaaataccaaaaattagcagggcgtggtggtgggcacctgtagtcccagcttctcaggaggctgaggcaggagaatcgcttgaaccctcagaggcagaggttgcagtgagcagagatccagccactgcactccagcctggcaacagagccagactccatctcaaaaaaaaaaaaaaaaaaaaaaaaacatgagatagaatctgacagcgtataagaaggataatactcatgaccaaatgggatttattttagaaatacaaagttagtttgcaatgtaatttaccacattatcaatattcaacatccagttttttttccaccttccactatctgaccaagaatatttttttcacaaacatccagttttaatagaaatgttcaacaaacaaggataacaggaaacatcctcaaccttatgataaaggcatataaaaaatcttactgcaaacaacatacttaatagtaaaagaaggaccaatttcctgtaaagtcaagaataggacaagatrtccattctaaccacttctttctaacgttttactggaggtccagtgtgttaagatgaagaaaataagtaaaattgtttttagtggcaagtggcattattatctatgtaaaaattctaagaaatcttcaaaagagaaactttaactgataagtaactttagcaaggttacagagtataagatctgtacaaaaactaattgtatttccatatactagcaacaaaccatttgaaaatacaaaacttttaaaataagaagcttaaagattctgcttaaaatagcatttaaaaatataaaatacacagctataaacttaacaacatatgtggaagccctctaccttgaaagagatggaaaacctaagtaaatgaagggattatatcatgttcatggatatgaagacttaatattgttaaggtgtacgtcctcctcaatttgatctttaaattcaatcccagtgaaaatcctagcaggtttttatataattgaaaatatgattctaaagtttttataagattgcaaaggagaaaaccaaaacaatccatataaagaacagtgttggaggacttacatgacctgatttccagactaaccatgaagccacattaatcaagacagtctgttattggtatagccataagcaaatagataaattggaacagaaatagtccacccaaatgtatgtttatgcagttaattcatcttcaattaaggcaccaaagcattcagtgagtaaagaaagtgcttttcaaaagttggtgctagaacaactggctatatttgtgaataaaagtgaatcttgacccatacctcacaccatacacaaaacttaattcaaaatatgtcatagatctaaatgtattaataaaagctaaaaccataaaacttcttgaagcaaacttaggagaaaatttcaagattctgaaatcactaaccataaagggaaagaattgagaaaatagatttcaccaaaatcaaaaaaatttccatttatcaaaagatgctatttaaaaaagagtagataagccacagtgtaggagaaaaaaaatatatgcagaacatacacatgcatgagactggtatccagagtatataaccagctcctccaactcaagttaaagacacaacccaattttttaaatggcaaaatatttttgaagggccattttcacaaggcaagatatacaaataataaacaatggaaaagtgctcaacatcattaggcatcaggtaaatgtaaattaaaagcatgataagataccactataccataatcccagttgaatggaaaaaacttaaaaggcaatacccaatattggcaagaatgtggagcaattggaatttttatacactgctaatgggagtataagatggataaaagcacttttcatatctatctggcagtttcttataaagtaaattatacacctaaccctaggacccagcaattccattcttagatatttaccaagaggaggggaaagtatgtttaaaaaatgttttgtacaagactattcataataactaaactggaaaccgcccaataccagtcagcaggacaatagataagtaaattgtggtacagattaagcatccctaatctgaaaatcagaaatttgaaatgctccaaaattagaaactttgagcatcaatctgatgccgcaaatagaaaatctgcacctggtgtcatgggatgggttgcagtcaaaatgcaggtgcacaacacagcttatttgcatcgcaagggatagaagaccctcccagcccttttcagctgcaatataccttttctgcacacacccagattcccccacccaagcacccccacaaagggtaataaaatggcacatgtataggccagatgcgccaatggcaggttccccacaatgccccaaatgggccccaggcctatgtgcattactcactgtattacttcgcttattctttagtctggtgtgaagatagtgttgacagtgtcaaaaaggactgcagctacccctatgggtgttggtgtcaagaaaaataggaagcatttatgtttacctgtagcatagaaagtcaagttgttggagaaactagacagcggtgtgtgaactgtcttttagaagagtatgctattagaatgtccatatatgacctgaagaaacagaagggtaagctgttgacattctgtgctggaagtgatgagcagaagttaatgaaaaagagaatactgcataaagctacaaatgaagatatcaatcatgtattgaagtactgcatttgtcagcattgctgtgaatacatgccatttaatggcaggctgataatgaaacaaacagatctatcacagtgaactggaaattgaagagaactgtgaacatttaacagactggttgcaaaagtttaaaaaaagacagtgctctcttcagcagtacatatacttaaaaaaaaaactggaatgatacaaagaagattagcatggcccttgcgcaagcatgatatacaaattcatgaagcattccatgctaaaaaatagtaatgataaaaacaaaaaagtaggccgggcacagtggctcatgcctgtaatcccagcactttgggaggccaagttgggtagatcacttgaggtcaggagttcaagaccagcctggccaacatggtgaaaccctgaccctactaaaaatacaaaaattagccaggttggtggttcatgcctgtagtcccagctactcaggaggctgaggcatgggaattgcttgaacccaggaggtggaggttgcagtgagccgagattgtgccactgcactccagtgtggtgacagagtgatactccatcaaataaataaataaataaattttaaaagtcacagcattgaatttttaaatgtttgggatgataaagcacctgcttatcatgaagctagagaaattcaatgacacgtttgccagggtctttgctagtgatgttggaacaagtctgtaatgctgatgaaacatcactgttcgggcattattgccccagaaagacactgactgcagctgatgaaacagcccttccaagaattaaggatgccaaagaccaaataactgtgctgagatatacttasgcagcaggcatgcataagtgtaaacttgctgttataagcaaaagcttgcgttctcactgttttcaaggagtgaatttcataccaatccattattatgctaataaaaaggcatggatcaccagggacatcttttcagattggtttcacaaacattttgtaccagcagcttgtgcttactgcagggaagctgactggatgatgactgcaagattttgttatatcttaacaactgttgtgctcatcctccagctgaaattctcatcaaaaataatgtttatggctcacacctgtaatctcaacactttgggaggattgcctgagcccaggagttcaagcccaccctgggcaacacagcaagacccaacctctaccaaaaaaaaaaaaaatgaactggatgttgtggtgtatacctgtattcccagctacctgggagactgaagtgagaggatcacttgagcccagsaggttgaggctgcagtgagccatgattgcctcactgcgctccagcatgggtgtcagagcaaatccctgtctcaaaacaaaaacaaaaatgtttatgcctttttgccatctactttctcccaaatatgactttattaattcagccatgtcagcagtcatatccaaaaaattattgccaagagcagtgtcaagaagcttttgtcctgtgttttattctagtagttttatagtttaaggtcttaatgtttaggtttttaatccattttgagttgattttgtttatggtaagataaaagtccagttttattcttctgcatatggatattcagttgtcccaacaccatttattgaagaggcaatccttgccctgttgtgtgttcttggcaaccttgtcaaaaatcagatggctataaattatggatttatttctgggctttctattttgttccattggtccatatgtcttattgaaaatacttttatgtatgtttaccttttccattttctcttttgtaatttgcttgtttatattctctccccatttctctttctttttttcttttgatttttagctactttatatattagaaatagttttccccagtatcacatctgtctcttgatttgtatatggcatcttctgtcatatacattatcttttacttaaaaaatgtctttccccttaaggctgttcgttttttttctgtcttccttaaataaaactttatcacactaaattatcaataccacctagattttcttctgatacatttgttattttgttattgtgatacttgtttttatatatggtaggaagttcagaagtgtatgtgcttttttttcagctggatagctagttaggacattgtcattatttaaatacctaaaggactgttttggcatagatttgggtctattattgaactctattctgttcttctggtctgtgggtctcttgtagtgtcagtactagtgttttgattacagtagctttatcaaaagtgatagaatctggtaagacaagtccctggttactttttactgtccatacatttattcttccatattaacactggtatcttattctttttttaaaaaaaagatattttaaatcattgatgtcctgactggaattactttaaatgtataagttaatttggaaagatggacattactatactactacagaatttgtaaagtaagagattaatgctctgtgaattatgatatagtattataatagattcacacttaaaatttgattttctgctgccttgcttatttgcacttyagtggcaactgttggggtaatagcttcagagaactttgcagtggtagcagtattctagggccctttgaaacaataaatagcatatttttcatgcaataaaatggaagagtttcattagttaagattttggttttttgtttttcaagagcacaaatggttattctgtatatggaggaaaaagacttattctgtttgttgagattatggaatttttatgcttgtaacccttctcttcaatccttatattcagaagcgattattggaagccatggagacatgtaaccactccctcaaaaaggaagagaggaaaagaaaccaacatagtgartgcctaatgtgctggtatgatagagacacagagtttatctatccttctccatggccagaaaagttccctgccatagaacgatgttgtacaaggtaatgttacttggtaatttttcaacaacaaaagagcgctcctaacacaagggtgcgagaagtggtgaagggggagctttgaatatctgtttggagaattagcaaatagtttatgacagttatagtcaattgataatcaatgagttacatctaacttgcagaggatctaaggatctttcacacttgtgtctataattctctactttggtcagattctttgtttctctttccttcttctattaaaagtgtttgaattttttctctctaatgtatatccctgcattttgtctccctcgaatggatatgtgaatttttgtttccattgtcagtgtttctgctcccagcattatttgatacgctgtgayattgattataccccccagccacccaactagaaagaaggaaataagaaataaagagctccatttttttctcttcatgaaaatatcttcctttttttctcttctctcaycttccctgcaaataatctacccagatggcaattgagttgcaaataaagtaaacatctctcagttacaacttttccttttgttaaaggaaagagaaagataaaacaggcattataaaatgtttattttccatcctgggttttggaacatggaggatatagagatttgtgttatgtgtcatattttatcttaaaatttatatatatagttttgttttagattaatggggaaaatctcaacttagtaatctacaggcatgattgtgtctagaccagtaacaatagagaggctggttatctgcttgtgttttctttgtctggaactaattgtcattctcttctttaaaagcaaggatgactcttacgaaatatacaagggaaagttaaaaaactgtaattgtttgtaatgtattaattttaaattaaatgccttgatttattttctaggtataaaataatatccttagatgcttggcgtgtagacataaacaaaaacaaaataaccagaattgaccagaaagcattatatttctgtggatttcctactctgaaacacatcagacacaaagtcagtggctatttagttcagaattttttcactttattaagtgtgaagtgattatggagaaagaattaaaattaaattatttgaattcttttaaagttttttttgaagaaargtggtgttcaagtattccagcaaagcagtcgtggagaaaacatgatgttggaaatcttagtggatgcagaatcagatgaacttgtaagtattttatttatcattcatttattagatgcctataatgtattaaactgtagctgctgggwtgtttaccagggaggtattatatgttgtaactctagaaatttggagcctaaataaggatgaagcaaagaaacattcatacaaattagataatagttcaagaacctgtatcactgtgacacaatgaatatacaaattttctagaaattttaaaaaggagaagagctatgtaaaccaaaagttaagtatagacttgtaaatgagaataggcttgagctgaggactgaaaaacaggttaggacacagaaaaggaggggaaaggcattctagtcaaaagaaatatcatgagccagtcatttcagtcaaaaatgtcatatattattgtttttaacctttttgtgtatctgaactatttcttaacacttagtcttttctttagaataaatgtgatatatttgaggagaaggaataaataagccttattgaagcagaggatttgtgtttggaaatagtagaagataagtttgaaaaatcagattgaggccagattatgtcgaaccttgagtaccaggctgagtttggacttattttcccatgaccattattttggaattgatattttcataaagattaatttggtggcagtataataaactaaattgcacaaaagagaaatcaaagaaagcrggaaagcttgcgagtgtagcatcaggtgatagagacataaacttcagaagtagcaatagatctagatgaacaagatgaaataaaactgataggtttcattatttggtcaaatacagggggtgaaaagagaaactattaatagtaaatgtgactgagatatccaggctaattaactaaaaaaaaaattgtaatttactggactagaaaagttaaaacaggggagttgatagtttagggggatgaaatgataaataatgatggaattttaaggtaacactaggatgtttaaccggaactgccttgccagcctttcttaaccagtattccacaagatgtataagccctaatgccctaagtcattcattgtaagcaataaattaacttatcttctgtgcatttagaacagtaggagttatgtaccatctttgagagaacagagaaagtagacgtattttgtgttctctgattcagatgaaaaacctgtttagaaagtctgtttatggctgggcatggtggcttacgtctgtaatcccagcacttttggaggctgaggcgggcatatcatctgaggtcaggagttcaagacaagtctggccaacatggtgaaaccccatctctactgaaaatacaaaaattagccagacttggtggtgggtgcctgtaatcccagctactcgggaggctgaggcaggagaattgcttgaacccaggaggtggacgtggcagtgagccaaaatcgcgccactgcactccagcctgggtgacaagagcgaaactccatctcaaaaaaggaaaaaaaaaagaaaggctatttatatacagttaaatacctggagctagagcttggagagagagaaggatattcaagttgtcaacagagaattgatgactttgaggttcatttccttgaagacaaggtgcattgagtgttcatggtctcagcataaagaaatgcccacagttataaatggtggagagggagccagtagaaacagagaggttaggaagagtgattccaaagttaaatagtaccacagaaacatggagcagaggatgtaagctgcataaatctgaagaataataaaaactcaaataagatctgtgaatttgtcttttagaacatcaatgttgatctttgaaaattccatttcggtagattggtggaagcagaatttcaatttctgagaactaggctaagattgtgtagacgggaagtaaaggtagcaagtattaagcccttggtcaagaagttatgtgtttgtttgtttgtttgacagagtctcactctgtcacccaggctggagtgcagtggcgctatcttgggtcactgcatcctctgctgcccaggagcgattctcctgcctcagcctcccgagtggctggaattacaggctcctgtcaccacgcttggccaattttttttttgtatttttagtagagaccgggtttcaccatcttggccaggctggtcttgaacttctgacttcgtgatccacctgcctcggcctcccaaagtgctgggattacaggcgtgagccacagcgcccagcctacagtttcttaaaactagaattttttacttaagatattatttcctacagaatatttgtagagcattttatggtttatgaaagctttcatgtatatgattttcttttatcctcaacattgtaaggtagatgttattccttttcctcataaaagaaaactgagattcagtaggattaaatgatatgccaaagattctatagctgaaaaagtggtagaacccaaatttggacccgtgtctcctgattttaagtctaatattcttttttcatcacaccagccataaactgaaatgagcttgtatttcttagatcctgttttaaataattgactatttgatatgaaacagtcaatagttcttttctagatatttctgctgttctttttatttttctcagttaccataaaaaaataaggaagataattagaatgatagagttttacacctggatggaagatggaattttgtaaagcaactaattcaacttgttcattttatttatttatttatttatttttgagacggagtcttgctctgttgcctaggctggagtgcagtggtgcaatctcacctcactgcaacctccgcctcctgggttcaagcgattctgctgcctcagcctccgggtagctgggactactgcgtgtgccaccacacctggctaatttttgtaattttagtagagatggggtttcatcatgtttgccaagctggtcttgacctctggactttaagttttgggattacaggtgtgagtcactgcacccggccccaacttgtttattttagaatttaaaaaacttaaatggagattggaaaattttgcctgtgtaaagttttctcttagacctgaaatcatgaatgaacttttttgcttttactttaagaccgtagaaaatgtagcttcatcagtgcttggaaaatctgtctttgttaattggcctcaccttgaggaagctagagtcgtggctgtatcagatggagaaactaagtaagtaagatttgatttataatttttctaacatatatttgctttgtgactttgatggcttttattgattcatttttttaactgacaaaattatattaagaacatttacactctgtaccaaaaatgaaagtcgtctaatgacaccrcttgaagttcaaacactattgacagtttattgtacctctcttgagatattttagatgcatatgttattttttcccttttaatttcttggaagttctatatcctaattcttttctagaagtggttatcattatattacttagcaaatacatttctctttctaacaagaattaatagcatatgtaaccttcccttttccctgccccatctggatttcatttaaattgtacattaattttttagggcacatatcttttgttttaagaaaaatatcttaacatttcattgaaattcacaatcgtttatatcaataaatgtttagataaattattttttgtcgtttttttattatttcatataaattttatcttgatttcttatattttatttttcatatggctagaattttctgaaataattttttttcagagaagatgggtagatattatgttttttgattttgagttattacacatccgaaatgtctttttttttttttwaatttacacataggtttagaattttggaggcccagtttcttttccttttctcttagagctctgcatacatctctccattatgttattttatgtaatgttgatgagaagtcagtgccagtacggtttttttcctttgttggcatctgcttttgtatatgaaatcttgaggattttttttatcagaatttaattcccctacctttctgatgaagtccaatttattaatttttttatgcttttggtgtcatgtctaagagctcttattctagccctagatccagaagattttctttgatattttctttgaaaagttttataggtttacctcattttatatgaaatcagtaatccattttgaattaatttttgtataaggtataaggggcagatctactttcatgtatttgtgtatgaatattcagttgcttcagcatcatttgttgaaaagactgtgcttcctccatgtctgtttttatgccagtaacacattggcttgattaccatggtcttaacatcaggtagtgtgattccttcaacttcactttttttttttttttttttcagaattgttttagctattttaggtcctttgccttttcatatacattttataattttcctatatctccaaaaaatcttggagggatttttatatgaattgtattaaacctatagatcaatttggggagatttaactatgttgaatattcttatccatgaacacaatatatctcttcatttatttaratctttgatttctctcatcattgttttggtttttttcatcatactgatcaggtacatgttttgttagacttatacctgagtatgtaatttttcttggagtgagtatgaatggtattatgttttaaatttgtttcccctgctagtatataaaaatacaattgattttttatgttgattttatatcttagaatattttttcctttttattttatttttagagtttaggacagccagttattttgtagaattctggatttactctgttgtttccttttagtgtcatttaactttgtcgtctatcccacatatttcctgtaagctagaagttagggctagtagctgaattagattcaggttaaactgttttggtgaaaatactttataggggccaggtgtggtggctcaagcctgtaatctcagcactttgggaggccgaggtgagaggatctcttgaggccaggagttcaagaccagcctgggcatcatagtgagactctgtctctacaaaaaataaaatcattagctaggcatggtggtgtgcacctgtagtcctagcttctcaagagactgaggcaggaggattgcttgagcccagaagtttgaggctgcagtgagctatgatcactccactgtactccagcttgggtgacagaatgagaccccatctcttaaaaaaaaaaaaaaactttgtagataatgcatacttcatattgaatttgtatttttaactctttaaaaatgtttatttttatatgtttagtctcttaggaaaaaaatatgcttttaaattttattgactgactgactgattgggagagacaaggtcttgctctgtcgccccaagtgcagtggcaatcatagctcactgcagcctcaaactcctgggctcaagtgatcctcccatcttagcctcccgagtatctgggactacagatatgtgttaccatacctggcatattttttttatttttctttgtagagacactgtctcaatatgttgccagggtggtcttgaatttctggcctcaagtaatcctcacatctcagcctcccaaaatgctatgattacaggcatgagccactgcacccaaccttaaatttttttgatacataataattgtatatatttgtagaatacatgtgatattttgatccatgtatatgacatgtaattttcaaattatctgttacctcaaacacttatcatttctttgtgttgggaacattttcaatctcttctggctattttcaaatatacactaaattgttaactgtggtcaacctactgttgctatagaacactggaacttattccttctatctaactttgtattaaccaacttatcttcttcttcctctgtacttcccatgcttttaaaatttgaatgaaattaacaagccttgttctgtaatttatattagtttataaaaagacctgtaattattatagttttgtaatttacattacagttgtggggttttttgctagtataccatgtgaaaaaaatatttcatttggaagactcacactgctagaactctatattaaaccagaacattttggttatataatttttattttaactcttaaggttttacttggaagaacctccaggaacacagaagctttattcaggaagaactgccccaccatctaaagtggttcatcttggagataaagaacaatctaactgggcaaaagaagtacaaggaatttcagaacagtgagtatcgttaaaagtayttaatatcatggaactaaaatccgttttaatgtactcattctctaacttattttccatttaacatagtagttactctgaatactaattacaccttcatcctgttttagaaagtaatgagttctagtttaaaatgatacctgattagcagtagttacagccttgcccagtttgtcactaaaatacctaatgaagtatagaaaaaaaatgacaaattaatgtaatactaggaataacacttaatacattgactgattttgagagctattttcactaactgtataaggccattgaattttttggccacatgtaagtcatgaaaattggaagaaaaatcctgttttgttcctcatcttctcccgttccccattccctttactctcttccacccaagccatattccccagggcttagaatgcagccaaactgaaatgctaacccacctgggaatgttggttttcaggatcaccagagtgttttgtgtcccatgatcccaccccagcagcacctctcctttgccatccaaacacaagaattcccaaaacaaaagcagaatacgagaggctggcattggcacatgaaatgttttaaatgtataccatcagccttcctatccatggataagctttcggagaattcagggatactccttctaattttggggctaataccaggccacaatatccttattcaaagatgaataaaccgggaaaacgttcaaagaccatgaaaaaccatccaacaccaaaggagataaacatagctctcgagaggtagagcatatttttgcctcccaacagtgtaaattagataccccatcatagtttatatcattctaagttgtcttttgtagcatataaataaaaccataataaacttacttgtatgattaatttaataactctttctttagatagtatgcaccataagagtagagagcatatctgtttttgttacttctttattccaatttattggttagtgcctaggcactcagttactgagttattgtttgaatgaatagataatattttagtcaagactcctttaattggaaaaaaaaatcattcaaagtacttcgggtaaagtgtttagtcatttgtttatatatgtaacattgatatgtgaatatcaatgtattgatacctgccataatagatacagtagtatgcattgtaatgaataaaaacacgtaatgaataataatgagtaaaaacacacagttcctacacttatgatatttacagctgctggatgggagacaactatggtaattgcacttgaaggagtagtgctctgagaccatttgacttagctagggaggaatttgtcatagtcagggacagtttcccaaggaagtattgattaaatcgatatctgaatgctgactgggagttaggcaaggaatgaaaaggaagtgtttcatgatgagggaagacttacatgaaaagccctgtgrcaggaggaaaagcagtgtgtattgaggaagatttggcaacaaagaaaaaagaaagtggcaacctcagaagtaggaggacagctagaagagggttatatcatgtaaaccaaaggaaaagattatttcaagaacaaggtaataaaccacaccgtatattttgaagagatttagcaagagctgtattgattgagccatggagctgaaagccaaactagagtgggtaaaggaatgattgagagttgcagaagtggagacacagtagaaattgacaacttgttcaaaaagttyagctgtgagagagagaccaagagatcttgacctcttatctgttgttccccttctgaatgagcttgaacttctatgagggcagcaaaggacagagagagtcgtcaatgcagaagactgctggagatgataacaatgtatactcgttcactcgagaatagtttctagtgcctgccaattcaggctgtcctgtttaaccttgtcgaccaagttgggtagacaaggctatgtggattcatgagcacttaggtttattttattctggtcaccattttcttagactgcttttctttgctaccatattcccccctgataccatctcactttttgtcccttcctttcatgcctccctagctcttctgtcttccaaggtgaaattcacaagattactgttgctctgcccctgagggtttacttatttgtgatttttgcacattagaatgttagtagcatgaggtgaggattccatggctctaacaataggagttatccttatgcagagcattcttagctctatgacttttgcaggaagaatgtagaacctattacttatctcatatctccatgtatcttaactaagatatgttctactaagttgagtatattcttttcctataaacatatacatgaaatatttccataagtaccaaatcatgtagttttattttgagaaaccctctaagcacatatgatgtacctaataaatttctgtatacctgtgtaacaaattttttttctgatgaaaatcaccagtaagagatagctaaagaaggatataggattgagtagagctggtttttggtttattcagagagttttaattgtgtgtaaaaacaatgagaaggagcagagagaaaacaataaattctaagatggaaggagatggattcttaaataggatatgagatagctcctctgttttaacagtatgggaagcaaatataagttggtttgtgtgtttggcatggggaaagctgaggagctctcatttgattatattttccttgtaaagcagatgctgagtttagctattgaggatggctggaggaaaaggaaggttggtcataagttgaagtagagtgaaggaggtttgaaaatagttattcagggaaatagaagactatcagtttatcaggaaaatgtggtagaatggtaagcagtattgaggatcctttttgaagttggagtcataatttataatgaaacattctaccctgtgttttgggatagaagtgagttcaccagtcacagccttagaaaaaacaaatggctggatttactcagcactggattttgccacatgagcacaatgaagagacaaagaggcaagagagtttagaatattggcaagaatgttactgaagtggtggatggtgaaatctaagtgggatagagggagaagtgaagaaagtagacagtaatagtagtaatagtctgggaggccaggcacggtggctcatgactgtaatcccagcactttgggaggccaagatgggcagatctcttgaggtcaggagttcaagaccagcctgcccaacatggcaaaaccccatctcttctaaaaatacaaaaattagctgggcatggcagcgcctgcctgtagtcccaactactccagaagctgaggctggagaatcacttgaacctgggaggcagaggttgcagtgagccaagatcacaccactgcactccagcctgggcaacagagcaagactgtctcaaaaaaaaaaaaaggtctgggagaagatagaaagtttagtggtttggaaatcctagataaaattgaacaaagtagttgaacatgcaagttggatgaagaggaagttatcagacagtragatgtttgtgttagtgatttcagaggttcggtagttatggataatgtcaaaaaccaagtcatagccatagaaattgctggcttacgcatatctacaactatctgatctttgacaaacctgagaaaaacaagcaatggggaaaggattccctatttaataaatggtgctgggaaaactggctagccatatgtagaaagctgaaactggatcccttccttacaccttatacaaaaattaattcaagatggattaaagacttaaacgttagacctaaaaccataaaaaccctagaagaaaacctaggcattaccattcaggacataggcatgggcaaggacttcatgtctaaaacaccaaaagcaatggcaacaaaagacaaaattgacaaatgggatctaattaaactaaagagcttctgcacagcaaaagaaactaccatcagagtgaacaggcgacctacaaaatgggagaaaatttttgcaacctactcatctgacaaagggctaatatccagaatctacaatgaactcaaacaaatttacaagaaaaaaacaaacaaccccatcaaaaagtgggcgaaggacatgaacagacacttctcaaaagaagacatttatgcagccaaaaaacacatgaaaaaatgctcatgatcactggccatcagagaaatgcaaatcaaaaccacaatgagataccatctcacaccagttagaatggcagtcattaaaaagtcaggaaacaacaggtgctggagaggatgtggagaaataggaacacttttacactgttggtgggactgtaaactagttcaaccattgtggaagtcagtgtggcaattcctcagggatctagaactggaaataccatttgacccagccatcccattacggggtatatacccaaaggactataaatcatgctgctataaagacacatgcacacgtatgtttattgcagcagtattcacaatagcaaagacttggaaccaacccaaatgtccaacaatgatagactggattaagaaaatgtggcacatatacaccatggaatactatgcagccataaaaaatgatgagttcatgtcctttgtagggacatggatgaaattggaaatcatcattctcagtaaactatcgcaagaacaaaaaaccaaacaccgcatattctcactcataggtgggaactgaacaatgagatcacatggacacaggaaggggaatatcacactctggggactgttgtggggtggtgggagtggggagggatagcattaggagatatacctaatgctagatgaggagtgggtgcaacgcaccagcatggcatatgtatacatatgtaactaacctgcacaatgtgcacatgtatcctaaaacttaaagtataataaaaaaaaaaaaaagaaattgctggcttaggtgaaatgaaggaggttattggagataaagagattatgaaaatgagttacagtggtgggtagatcatacatgtagacattgacataagaatagaatgggaagtggagggtagttttctactagagattttgaggtctcagtgggctgtaaggagaataccaaaacactctcctacccctgagggtgcatggtatgaaaacaaacaactactatttgatagggaagtggtggaaccttcagataaggaggtagaagttgaggataaaatggagtgaaaaggtttaggaatggaagaagacctggaaaagggggcaaggaagtactttataggacatcatggagaaagtgatgcacatagaggataatttggagaacagctcctgacagatctagtaatcaaaaaacaaatatgcaaaaatagaatcaaaataatataatgcattgctgtaaaagttatagatcagattatgcaccatatattaaaaaccctttcatgcaggatagtaagaaaatacaataaattttatttcattcatatatatatatatatatatatwttttttttttttagtgagacggggtcttactatgtcactcagggtggagtgcagtggcacattcatattatacctcaccacaacctggagctcctgagttcgagcaatcctcctgcctccgcctctgcaatagctgggactataggtgcataccaccatgccaggctactattttaattttttgtagagatggggtatcactgtgttgctcaggctagtctcaaacacctagcctcaagtgatactcctgccttagcctctggagtacttggaattacaagggtgagccaccaagtctggctaagaaattttaaaacagacaacaacactgaccccaaagcagtaaaagtatatagtaaaagaaaaagtaaatggacgaaaatcttccaaccacttgggaatttaaaagttttgagctaactatttgggggattttattttaatagaagcatcgaaatacagccataccttgttttattgtgcttctctttattgtgcttcagagatagttgcatttttttttacaaattagaggcttgcgacaaccatgttgcaactctatcagtgccattttttccaacagtatgtgctcacttcatgcctgtgtgtcacattttggtaattctcacaatatttcaaactttattattgttatttttatatctgtcatggtcatctatgatcagtgatttttaatgttactattgtaattgtttttggtcaccatcaaccatgcccatttgagatggtgaattaatcaataaatgttgtgtgtgtgctgactgctctaccaaccaacggtcccctagtctctttctctttccctattccatgagacatagcaatattgaaattaggccagttagtagccctacaatgtcctcttaagtagtcaagtgaaaggaagaatcacatgtttctaggtttaaatcaaaagctggaaatgattaagcttagtgaagaaggcatgtcaaaagctgatacaggccaaaagctaggcttcttgcaccaaatagttgtgaatacaaaagaaaaattcttgaaggaaatcaaaagtgctactccagtgaatacaccaatgataagcaaattaaacaaccttattgctaatatggagaaagttttagtggtctggatagaagatgacactagtcacagcattcccttaagccaaaggttaatccacagtaaggccctacctttcttcaattctataaaggctgagagaggtgaggaagctgcagaagaaaagtttgaagtaagcagaggttggttcatgaagtttaaggaaagaagccatcttcataatataaagtgtgagctgaagcaacaaatgctaatgtagaagctgtagtgagtcatccagatctagctaagattgttgatgaagatggctacactaaacaacaaccctagacaaaacagccttctattggaataagatgccatcctggacttccataggtgcagaggagaagccaatgcctggcttcaaagcctcaaaaatcaggttaactctcttgttagggaaaagtgcaactggttactttaagttgaacccggtgctcattgaccattctgaaaatcctggggcctttaagaattgtgctaaatctatgcctgtgctctataaatggaacagcgaagtctgaatgacagcacatctgttaacagtgtggtttactgaatatgttaagtccactcttgagacctactggtcatagtaaaagatcctttccaaatattactgttcattgacagtgcacctgatcaactgagagctctgatggagatatgcaaggagataatgttttcacacatgcaaacacaacatccattcacgcatgcaaacacaacatccattctgcaacccatggactaaggagtactttgaactttcaagttttagtagttaagaaatacatttttggccgggcacagtggcacatgcctgtaatcccagcactttgggaggctgaggtgggtggatcacctggggtcagtagttcgaggccagcctggccaacatgatgaaacactgtctctactaaaaatacaaaaattagctgagcgtggtggcggacacctgtaatcccagctacttgggaggctgaggcagtagaatcgcttgaacctgggaggcagaggttgcagtgaaccaagatcacaccactgcactccagcctgggcaacagagcgagactctgagtgactgctctgatggatctgagcaaggtgaattgaaaacgttctggaaaggattcactattatagatgccattaagaacattcatgattcatgggatttcaaagtatctatcaacattagcaggaatttgaaagaagttgattccgacgcctcctatatgactttgagtaggttcaaaacttcagtggaggaagtaactgcagatgtggtggaaatagcaaaaaaaaagctagaattagaagtggagccttaagatggaaatgaattgctgctttctcatgataaaacttgaatggatgaggaattgcttctttgttttgttttgttttgagacagagtctcgctctgtcacccaagccagagtgcagtggtgcgatctcggctcactgcaacctccacctcttgtgttcaagctattctcgtgcctcagcctcctgagtagctgggattcaggcaagcgccaccatacgcagctaattttttatayttagtagagacagagttttgccattttggccaggttggtctcaaactcgtgctctcaagtgtccacctgccttggcctcccaacgtgccaaagtgcttagattataggcatgagccaatgcacccggccaagagtagcttcttatagatgaacaatgaaagtggtttcttgagatggaatctactcatagtgaagatgctgtgaacattgttgaaatgacagcaaaggatttaggatattacataaatttagttgaaaagcagtggcagactttgagagcattgactccaagttggaaagaacttctcttgtgggtaaaatgctataaaatagcattgcattctgcagagaaatctttcatgaagagtcagctgatacagcaaactttattattgtcttattttcaaaaattgcgtcagccatcccaaccttcatcggccactgccctgactaatcaacagccatcaatatcaaggtgagaccctccactaacaaaaagttaactactaatagcctactgttagcatttttgagcaataaagtacagttgatctttgaacagtgtgggaggtaggggtgctgacccccaatacagtaaaaaaaatgcacatacaacttttgactccccaaaacttaactgctaaaagcctactgttcatcagaagacttgccgataacataagtagttgataacgcatattttgtatatgtattatatagtgtgttcttacaataaagtaagatagaagaaaatgttattataaaatcataagagaaatatatttactattaattaagtggtagtggttgatcataacagttttcatcttcgtcttcatgttgagtaggcagaggaggggttcatctgctgtcttggaggtgttagaggaggaggaaaatctgcatgtaagtggacctatgtcattcaaacctgtgtttttcaagtgtcagctgtatttgaaaatgaaagtattgtcttagcccagtctgaggctgggtaatttataaagaaaagaggtatgtttggctcaaagttctgcagactgcacaagaagtatggcatcagcatatgtttctggtaagggccttaggaagcttccactcatagcagaagacaaagaggaacaggcgtgtacagatcacatggcaagaaaagaagcaagagaggggtagggagggaggtgccaggttctttttaacagtcagttctcatgggaactagtagagtgataaacccccgtatcctcctcattgcaaggaagacagcagcaagccatttatgaaggatccaccccatgacccagacatctctcaccaggctccatctccaacattagggattggatttcaacgtgagacttggtgaagtcaaacaaactatatccaaaccatagtagatatatacattttttaaagacataatgctattatacacttaatagactcagtgtaaacataactttggtatgtactgggaaacagaaaaattcatgtgactcactttattgtggtggtctggaactgaacctgaaatgtctcccaaagaatggctgtatacatatggagcaaaaaatacttgcgaattataggtgtattaatcataagtatattacttgatgaattttcacatgtggaacaagaatacaagtcaagaaacaataacaggaatattaccataatccaaggaagtcccttgtacacccttttatccattaccatccgctgctccctccccacccccagtgacgaggataaccattttgacttgtaaccacatacatttgtgttttctatttttgaactttatgcagtataagttcattcacacagagtgtattcttcttgagcctgatttcttttggtcagtattgtgattctaatatccatattgttacatgtaatcatagtttgttcattttcactaatgatactattacattgtatgaatacagcacaatttttccattctacagtggatggatatttgagttgtttctcatttggggctcttggtgaacgtgtatatatgcattccttttgggtatatgtctatgcattccttttgggtatatatctaagagtagaattactgcttcatagcatatgcctacattcagcttgaacagatactaccaaaaaggtttgcaaactctttgtatcaatttacgctctaccagcagtttataagaacttatgttgatttctgttttcataagtacttactattgctttttcattttagccattttggtatagtagtagtatctcattttgctttaatttgcatttccctgatgactaataaaattgaacatcctttcgtgtttgttggccatttgaatatgcatactcttttgtgaaatgcctgttcaagtctkttgccctttttaaaattgggttgattatctttttctcattactttatagttttcttactggcttattgtgtcattctcaatttcaggggaaaactaagtaatttatctttaaataaaattatcactgtagcttgtttttaattactgttctttatcaggttaaggaaatttccttctattctgattaagagtttttatcattaattggtgctgatttgtaaaatgttttttccgcagctgtcaaactgattatattatttttatcctgttaatctgatgaattgcattgattgaatttccaatattaatctacccctaaatttctggaataaatcccatttatttatgatatattatccttttatacataattggattttatctgtttaagtttgttttaagatttttgcatctactttcatgagaaatactggcccataattataaagatttcctgaaatgtcctggtcagctgttgatatcaagattactggctaaatgacttttaagtgaaagtggtagaaaaaaattctaataaatttttagaaaatggtgtgtttcaaaaatttgttggaaaacttttgtttctggctaaggtgacatgacttttttcagaccaactttgccatagacaacattattaaagtataagctgatgtgaaaaaatatataacgtgttatataattatatactatattatatgctatttatatagtctatattatatactatttttatgacatatttgtataaacaaaacttttaaagtgtgattggtaaagtgagctcggtagatggactgagtagtaatacgggcatactaaaaattgaatcagtgagctaaatgatcaaccttaggaattccttcagtaagcagtacaaaagcacaaagagatgaaaataatatcagaattttaatatctatctattaggagttctagaaagagaaaatggaaaggagataagaaagtattccttaaatgaagaatgattatatatttagatgaaaggtcagcaaacttcttctgtaaagggcaaatagtaaatattttaggctttgtagactttacaatgtctgtyacaactactcractttaccatgtagcgcaaaagcagccatagacaggaagtaaatggataactatgttccagtaaacttttatctaaaaaactaggaggctgtctgaattactttagattggaaaagccatcacatactcctggcaacccccaatctattttctgtcttcatggatttacctattttagatgtttcatataaatggaatcatatgatatatggccttttgtatcaggcttctttcatttagcatgctttcgaagttcatacacattgtagcatgtgtcagtgcttattcctctttatggctgaataatattccattgtatggatatgccactgtttgtttatccatttgttcatttatgaacatttggattgtttctaccttttggctatttgaatagtggtgctatgatcatttgtgtatcaatatttgtttgagtacctgtttccaatccgggggggttggaatgcttagaattgttgggtcatgtgttaattatatgttgctttttgaggaactgccaaaccgttttccacaacagctgcaccattttacagtcccaccagtaatgtacagatgttccagtttttccatgtcatcaccaaaacttatttttttccctgttttttaattataacgatcctagtggatgtgagaacaggagttttgtatagctctatgagttcttatttaatcacagagacagttggagaagtacccacagagtaaaataaataatgcaaaaagtctcaagttaggtacctggaactgctagcgtatttatttaaagtttatttacacacttgattatgagttgatagtttacgatagttgacgattatcgtcctagaatatctgcatactcattcatatgtatatttcatgtttattctttattttagctacctgagaagaaaaggaataataataaatgaaacatctgcagttgtgtatgctcagttactcacaggtcgtaaatatcaaataaatcaaaatggtgaagttcgtctagagaaacagtggtcaaaacaagttgttccttttgtttatcaaactattgtcaaggtaagtctatatcaagtttcaattctgtcttaatatacactattaatacactattcactgtataatgaaaagatatgttaatataaatagactaattcagcaatgtataatagagattatcatttaatataatttacaaaataacttattatttgtaagaagtattacatgctcagacactcagtatatatagttaggaaacttgtcttttatgctttcgtatgcttttttttttttctttttttttttttgagacagagtctcgctctgttgcccgggctggagtgcagtggcgccatctcggctcactgcaggctccgccttctgggttcacgccattctcctgccacagcttcccgagtagctgggactacaggtgcccgccagcacacctggctaattttttggtattttttagtggagatggggtttcaccatgttagccaggatggtctcaatctcctgacctcgtgatccacccacctcggcctcccaaagtgctgagattacaggcgtgagccactgcgcccagccttttatggttttttttaaggacttagactctaaaagaaaaaatcccaccattaacttacacccttgaattttatatttttattcttcaaaaatgtttgccttaaatcttataaatgtaaaaggcattttatttttgcatttataatcttagatacgataagaggacaaaaatttttttaagtatgtagcgatcctgtaatttggggtgttatagtacagtgtagtgattaagtgacttaagaacactggctgcctgagttggcttcttagctgcatgaccttggacaagattcatcccctttctgtgccccagttttgtcatctgtaaagtgaggctaataatggtctctgccacagaggtttgtcatgaggattaaatgaactcaataaatgtgtgaagcacatagaagggtgcctgccatataaccagtcaacaaattttagctcttggcattatgtagaaaaatcttcacattgacatttgcaaacagcatagtcataatcccataggaaaaaaacttgatacgcaatctatagaaattatgactaagattatttacttttattttatgtaggacatccgagctttcgactcccgtttctccaatatcaaaacattggatgatttgtttcctctgagaagtatggtctttatgctgggaactccctattatggctgcactggagaagttagtttccattattgttactgatacatttttctctagtttaaagcagttacttaacttctcttcatttaggtttaaattaaaatataataatgaagggaaaaaataaagaatttatccatgtaacttatgaacacagtgtttgacttatatatctaaatactatatatctaagactaaagaccatatacttttagtcttgagcagattaggatcaagaggtggtgtgttcaaatcctgatctctttttttttagcagttttgtttattgtagtggtatggatgaaacgattttgtaactattttagacatgtaataggcttgagtgaatttgtaaatgcgttcatatttgaggaactttggttcttaaatggaaaaaggtacatgcaaatatggaaggagagaaagcaagaaagaacctatagggacagatttggaagtattagtgtgaactcttggtttctaaaatatgtatatatgtttgtatatctgtgtatataggcacatatatatgtgtatatatatatacacgtatgcatatgtttctagctctatttgctgaaaggaataagaagcaaagacaccttagcacaatgagcacatgtaccacccagatcttgacgtctaatttcataactcactaaaaggaacagggcttctcagagaaattgctgattctggatctggggcagggaagatacaagatgaacctggaacatcttgttatgtcagaaagtaaggaggtgctcagaagaatggtgggagtatgtcatgtaaacacaggaaccaggttgagggtactaccactgcccaaatcttggatactttgagtgacaaaataattaaattcagtagttaattataaaccactggggggaaaacaggaattcatgattccgtagtgacagtaaaaagataaatagggaaaggaaggtctcttgtctgtagtagcatgtaagaagtaaatttggagagagtgctgcagttgaaaaaccattgtgcaaccattatgataaagattgaatcatgtaagaatcatctttgggaactaaatctagggggcattttttttttaaatcaggagcaggatatttgcatggtcttagaatgtatctcctacagattatttattagctgcaagggaaacgaaaactgtaattatgcaggaaaaaaattgagcaacatattaatggtataatcaaagttagcatcgcattaaaggacagatgaacattgtgtacctccagatgtaataccctttggaggacacatcacctatgcagtattctggctgtgaatgtactaccataacctaattatgtggaagcatcaaacaaacccaaaataaggaactgtttttttgttttgttttgtttttaaaaggcaggttggagagggagggacaaattatatattcttcaaaatgtcaatgttggctgggtatggtggctcactcctgtaatcccagcactttgggaggccaagataggcaatcacttgaggccaggagttcgagaccaggctggccaacacagcgaaacctcatctctgctaaaattataaaaattagctgggtatggtggcatatgcatgtaatctcagctacttgggaggctgagaataagaattgcttgaacctgggagacagaggttgtggtgaaccragatcataccactgcactccagccttgatgacacagtgagactctatcttaaaaaaaaaaaaaaaaaaaaaagcaataacttaaaaggtcagtgttataaaaacaaaaaaaggcagtggatacattttagattaaaggatgctaaagagatatgacaattaaatgcaatatctgatcctaatctggatcttgtaataaaggaagaaaatagttctataaaggacattatttggtcaactgacaaaattggaatatagatggtagcttagatgaaagtattatgtcaatgtaaatttatatacttaataactgtactgtgattatatagtaaaatatctatcttaggaaatacacactgaaatattgaggtcagggacatgatgtatgtaatatatactcaaggggttcagaaagataactatgtataagtaaatacacacatagtacacaaaagttaaaggcatttgttttacaatgctaacaacaggtgaatctggataaattttttttcttttctttctttctttttttttttggagacagagtctcgctctattacccaggatagaatgcagtggcatgatctgggctcactgcaacctccactttttttttttttgcaactttttggtactttgaaattatttgcaaataaaaagttaatttaaaaaagaatgattgggccaagcacagtggcacacacctgtaatcccagcacattgagaggccaaggcgggcgtggggaaattggttgagcacaggagtttgagaccagcctgggcaacatggcaaaatcccatctctgcaaataattgagcttagtggtgcatacctgtagctccagctgcttgagaggctgaggtgggaagattgtttgagcccaggaaggcaagtgcagcaagtcggcaagccatgatagtgccactacactccagcctagatgacagagcaagaccctgttgccaaaaaaaaaaatgattgtccaggtgcagtggcttacacctattatcttaccactttggggagaccaaggcaggaagattacttgagcccaagagttcaaggttgcagtgagctgtgatcccaccactttagcctgaatgacagagcgagatcctgtctacggccataccaccctgaacgcacctgatctcgtctgacagaatgagatcctgtcaaaaagaaaacaagaaaaaacaaattaacaaccattaaagcaatgatacagtgactcaaatttatagtattatagatcctgtctcaaaagaagttaaccattaaagcaacgatacagtgactcaaatttacagtattttcatacccacttaacaaatttcaagagaatttccactatccaacttgtcatactgtatttcaaaaataatagtgttcaaataagttaaaaaataaaatgtactgaaagagactatactgtgatttttttttcttctaaggttcaggattcaggtgatgtgattacagaaggtaggattcgtgtgattttcagcattccatgtgaacccaatcttgatgctttaatacagaaccagcatgtgagtacagtagtttgtattgtttcatttagaattgataaacttttaaaatattaggatatttttgccacctcctttgaatttatttcagatattttatttaataatgattagattctctctcccagttgcatctggtatttaaaaataagtgtggaatctgtgctcaaaacttcatgtagatctttgtggggggaaatcactgaaatcccgttattaatccatagtgattgttatggattattgtgttcaagcttataagaggcacattgattagcacaccctctgggaacagatttaggtgttttaaacctttcataataattcagagcctgcatttttagttgcaagtgacaaatggcctttctgcaaaggctgtatgtatctcttcagctaagaatgaacagtctcaatcctaaagaatattggaaaaatgcatttaagttaacagcatctttttcaggaccttctcaccaaaaaattccactggcgttcttttctcttgttaaaatagagggaaggttctgatatctgtcatttgttcttattgattggttggataattagctaaaattaattcgcaatcaaccagcttcattttctgactctcatgcctcgttctttctgatttatatctccattttgatggagcacttactccagtagcttctgagaaaacttgcatgtctggagatgtctttattcttctcctacacttgattgatagtttgcctgggtgtagaatcctagattagagattattttccctcagaattttgttttggttttggttttggttttttctttttgtgagacagagtttcgctctgtcatccaggctggagtgcagtggcacgatcttggctcagtgcaacctctgcctccctggttcaagtgattctcctgcctcagcctcccaagtagctgggattacaggcacccaccaccatgcccggctaaattttgtatttttttttttttttagtagagatggggtttcaccatgttggtctcaaacccctgacctcaagtgatctgcctgcctcggcctcccaaagtgctgggattacaggtgtgagccacaacacctggccttccctcagaattttgaaaccactgttccattctcttctcgtttccatattgytgttgataaatcctgtgccattctgattctgaatttctgtatgtgatctattttcattttctgaaatctttttagcacctttcccttactggtgctttttaataatgtgaggatgtgtgccttggtatggatcttttttcttcccttctcctgttcagctctttcaggcttgcaactgatgcccttccattctgagaaactttcttgtattatttctttgataattttctcctcactatttttttcctgctttctatttctgggaatccttttagttcaatcttagaccttctggattgatcttcttagttttatctctcctcatccatttcctatattgttatacttctgttctactttgggaaattcattcaactttattgtttatcatttaaaatttctatttgatttaatcattttaatttctaaaagtgtgtccttattctctggctatatatagcatcttgttcttacagtgaatggaatatcttcatttatttctctgaagataattctaggatttatccttctattttttgtgttttctgttaaacctttcataacaattcagcacctgcatttttagttggaagtgacaaatggcctttctgcaaaagctgtatgtatccactcagctaagaatgaacagtctcaaccctcaagaatattggaaaattgcatttaagttaacagcatcttttttaggactttctcaccaaaaatttccagtggctttcctttctcctgttaaaacagagggaaggttctgatatctgtcatttgttcttattgattggttggataattaacttagctaaaattaattcacaatcaaccagctattgctacttagcctttttttttccactaatagtaaaatataaagctttatatcctgtgaaatgaatttaaggcattatgtatcagcacacccatgaggaaactttatgtatggaaggcagtcatccctaaaatcttaccatctggtgccatttgaagaacaaatttagacagcagtcatgaaaccaggagagtggctctttagataaagtagctggagctttgtactgggaatcagtgaaggttaaataacttgtgttccttcatccctggctttttctagatctagaagagcctgtcctgttgtatgatagtgtacagtgttgtttctttctctttacatacgtttaactttcactcaagctgacttctttttttaccacaacattctcagctacttattttatattttctaggatgtttgtgatggttttaatgaatcttaaattatagcaaaacccattatttctcaaaaggagtactgttggcaatttgggcaggacagttatgtattaaataaaactgttttgtatatggcaggacagttggcatctttggctcaagggcattaagtgctagtagcccatgccagttattgtaattaaatgtgcctctacacgtttccaaatgcttgttagaaaagtgttgctacttatatttgagacctactaccttaattctttgaactgttctggaaagcatacttgatttgtattacattattgctaaatctgattatgttcttaagtatgttttattgttatgtacatgatgttaagagtatatggtagtttatcctagttagtattggattcatgaatcatttgcttcctggttaaatattatatgatctgttacttctttttttttttttaatgtgacaatatgttttcttcccttaagtatataaattaaggttacatttcattgactgtattaattatgggtctatacatgcttgtatgttttcatatgatagtaaatattaggggaaaagaatattacttatatccatatatgaaggacacttttagtttttctcagtagcaacgattttgatgatgtacctattttttaattcaatgtaataattactgaggcctcattttgtcccaagtactttgctaggccctgcttggaatatgaaaattagtagaaacgaaaacaaaaacaaacaaaaaacttgcctgtggagtttgccatttagtacttacagtagagtttatttcttaagacagtttcacaaactgtatatttcctccccccttttatccatccttgggaattctgtcctttaaggagaaagagagaggagcagaaaaattctgcctacagatcctttcaaaaaaaaggggaaatggatctaagtgaaaatccttatattgccacaatccaatggttagtgatgtcttgattatctccagattttaaaggtaaagaaataacatttaatgtaaacttgtgtttccataattgacctttttgtttttatatttaaagaaatattctataaagtacaacccaggatatgtgttggccagtcgccttggagtgagtggataccttgtttcaaggtttacaggaagtatttttattggaagaggatctaggagaaagtaagtttatgttagagaaatttacttaaagtggcagaaaaattaaatgataaagattaaatgcttaatatttcagtatttattttcttattaattgctctggattgtcttaaaattgtgcataaatttctctgatggtaatctttcatctgaatggcacatgttttaggtggttggaaaagacagttcttattttttagcagctaataaattgaaccttgaaaaaaggtatcagagggtgtgtgtgaacctcagtagtatatttccttgcatcttgttatttcattttcctctataattacataatttatttacatgctttgttaacttgggttttgaagcttttcttctagtttttcaattactgctactttggaaataaccataataactaaaatatagaagaataatcaaaactgagcttttctaagaattgaaagcaaaactttttgttccttgaacgacattttaaaactcktgtgtgtgtgtgtgtgtgtgtgtgtgtgtgcacgtgtgcgcatgtgtggtttaaattcagccctcatggagaccataaagcaaatgtgggtttaaatctcaaattcaacaagaaaaatgaggaggtacctggatatactaagaaagttggaagtgaatggatgtattcatctgcagcagaacaacttctggcagagtacttagagaggtaagtacrtaataagatactagtagtcattccaaaatcttaggaaaatactgtttattttgccttcctgatattagttttagaggacaaatatttccattagtaaaatctggcatatgttacatgtaaacttaattttgcatcatggaatatcataggcactagctaaaattgagtagaaaaataccatattattaaaaagaaaatatataatgaaaattgccctctttagttaaaatttttcttaacttactatcatacattgttcactaccttgcatacctatgtcagcactgagagaactgatatggataaacaaagctcttagcatagtggattttttctgattcttagaactatgtagctatacaggttactatcttagaattattgaattttattgctgaaattatctaggaaatcagcaagtcaactcataccaaaagtgagaaagccaagtaccaagattcactgagttactagtgacaaagatttacaggaagtatatttacatctgattcataatttaatgttctttccattattccactggtttctaaccttatatttgaagatctctttattagtttcctaggctagctcctgtaacaaagtaccacgaactgggtggcttaaacaacagaaatttattgtctcaaccagttctggtgaccagaagtccaaaatcgagatattgcaggacaatgatggtccctctgaaggcactagggaagcatctctgttctgtcttctcatagccttatatgttctttggcttgtaaatgcatccctgcaatcctccgtgtttatgtgatgttctcgctgggtgtctcacatcatctttcatctctgtatgtctgtctctgtgtcctaatttcccctttttgtaagaacaccagtcagatcagagtccatgctaatgaccacattttgtttgactgcctctactaaaaaccctatttccaaataaagtcacattcgataacttctgagtggggcaggacacaattcaatcccatattaccatctggaaatttagattgtttcttctgttcactttcttatttctttaaaaggtcatgtttaaactactttttcttaatttttcaacttgacatatttatggattttctgctgtgagtggctttcctatcctgagcttcagctttctttgacttccaccactctggattccctcagacacatatttcccctctcactaaacttttatgaagattttttattaaatctgtattaaaggtttacttccttatgatgaagtaaatgttcacagttggaccttatggagtattaagattacattttatttcttgtacacatttttgtttgctgtttttttcatttgcttcttatctgtgttcacataacaaattctgtgtcatagctgtttacactatggtcagacagatcaggtgattgctcagttccatttttctcttggagacttcttttaaaacctgtgtcttcctgcttcagtttgaactgattgctctctagggctgttgtgcagctctcattattcagtttcctggtactgtcatcctaggaattcagttttcttcaccagtctgccatataggattccttccttttctgactttcatgcctcactctttctgatttatatctccattttgatggagcacttactccagtagcttcctgagaaaacttgcatgtctggagatgtctttattcttctcctgcacttgatcgatagtttgcctgggtgtagaatcctagattggagattattttccctcagaattttgtttttatttttgttttgctttgtttgagtcagtctcgctctgtcacccaggctggagtgcagtggcacgatctcagctcactgcaacctctgcctccccagttcaagtgattctcctacctcagcctcccgagtagctgggattacaggcacctgccaccatgcccggctaaattttgtattttttttagtagagatggggtttcaccacgttggtctcaaacccctgacctcaagtgatctgcctgcctcggcctcccaaagtgctgggattacaggtatgagccacaacacctggccttccctcagaattttgaaaccactgttccattctcctttcgtttccatattgctgttgataaagcctgtgccattctgattctgaatttctgtatgtgatctattttcattttctgaaatctttttagcacctttcctttactggtgctttttaataatgtaaggatgtgtgccttggtatggatcttttttcttcccttctcctgttcagctctttcaggcttgcaactgatgcccttccattctgagaaactttcttgtattatttctttgataattttctcctcactatttttttcctgctttctatttctgggaatccttttagttcaatcttaaaccttctggactgatccttttagttttatctctcctcatccatttcctatattgttatacttctgttctactttgggaaattcattcaactttattgtttatcatttaaaatttctatttgatttaatcattttaatttctaaaagtgtgtccttattctctggctatatatagcatcttgttcttacagtgaatggaatatcttcatttatttctctgaagataattctaggatttatccttctattttttgtgttttctgttttctctaattgctttttttcctcctgtttgatttagtctctcttgcagtgttaaagttttgttgttgttgttcttgtctgatgatctttgatatccaattatatttaagaatgaggcactaaatagctgattggaaatttagtgtacttaggtggggtttatcaggtggatcaggagggactttcctgtttctacagaggacctcctagtatcactacctgcatgtttatcttttctttcccggagaggtggcctccacccttttccttgacagtggatatgaatgtagtggattaaactgattgccagtattctggaagttaaccagggaaagaaggtttcattaccaagtggatactgtgatacacctcccagaccacttttcaagactgaaagacctatccccttgcagcaggaatgctgctttccggcagccctcagctgtgagccctctttagtaattgcctggatgaggagaactgcctcaactaaggttactttcccttcccacaacagccgcaaatcaatgcccaatctataaggaggtatagaaacccagacattctgattgtcccaattcatggcaagtctgaagggccatcccagtttgagatctttgtggggctgttcaaggattccattgagaattggtcacagcccatcctcttcctgtgcccaattctgctttcttcctctcccttcccttccacgggtgttgatcaaacaagcactccctacctgcatgcttatctccatcccagagtccatttctagagaccttatgcttcctagtgacacattgtatagtatttatgctttcattaattcactgttttcagtataacacctgtcctctcctccttatgccttcctcacccctaagtccgtgactggtatacacaaggctagagtatctatttgacctctctaaaatatacgctacaggtcatatgctggggtggtaggcaggcaaccacatgacagtataactgcttgttatacaaactttaaatcttactaaacctcaccccacactttcaaatgtacctggaacctataattcctgagctttttcagagtgttctgtgttttaaatcaacttgcttcttattgacttcccccactggtagttcaagattcaacttattcctgtctgtcaaatcagataatattcattcatccagtttccagtttctaaaattttaacaggttatatatgccaccagataccgtgcttcatttttcatctgtctctctaggtctgtgctcttttttatactatattgtcattttaatggattggagagggatggaagataagcatatacgttcagtttgctatatgtatcgaaaagtcctgcactcttcagaaagaaatggagttttgaaaattatcagaagatgcttttaatctattttaatttgttgtattgtggagtgctctagttttgttgtgaaaattagaaaactaacctatagataccatttttgtctatcagctgtcattttaatgaaagagagtagagtcagtaattgaagtttrttataagtttatgacttgaaccttagccagtgggagttttttgagggtctaggagtastctgacttaccagtcttacactttctatcacttttaataatatcccttattaatattatagtagtcctcaataagctttatatgtttctttaggatctgaaattattatgtaggaagtttatccgaaattaaccatatatattttaagacaatatttttgtttgtttgaccagagctccagaactatttagttatatagccaaaaatagccaagaggatgtgttctatgaagatgacatttggcctggagaaaatgagaatgggtaagcaagatttatgatatttattacctcatagttcaattcagtgttttcaatgacaactgcagctggtttctcaagaatttcatattacttttttttttttttttttgagacaggttcttactctcttgcccgaatgcagtggctcaaatgtggctcactttagccttggttccctggactcaaacaatcctcctacctcagcctcctgagtagctgggcctattaggcgtacgcctccacatttgactaatttttttttttgactcctaggctcaggccatgctccttggcctcccaaagtgctgggattacaggcgtgtcttgttacttctttttgttttgttttgttttgttttgtttttttgcattgtttcatttttgctttaagagcttaacaaattttctttcatttatatcaacaaatacttttaaactaatctttttgtgtgtcttttaattactaagaggtaacatgtccatatttatattagatttagaattagtcccgattaagttcagtgactaattattagttatataagttttatgtcttttataatttatagccctgagaaagttttaatcaaattttaaaaattattgtttttgctttagtgctgaaaaagttcaagaaattattacttggctaaaaggacatcctgtcagtactttatctcgttcttcttgtgatttacaaattctggatgcagctattgttgagaaaattgaggaagaagtcgaaaagtgcaaggtactaactttcagtaaccaagattattgatgagatttggaattaaatggactatactttacaaataattcatttgtgtttcaaccaaataaaacatatacttagtgattctaattagtatcaaataatcctgtaatttaaaaaagttctaaccatttatagtagcttttagtagccaatagtgttatgccaaatttatattgtatagcactaatatgttaatggctacattagccatcataactaattataaacttataaaattatattttcaatatacaaaagccatagtatttaaattttatgcccttgtagtgtttccaatattgagaattaatattttgtgattttagttacagtagaaagtttgagaataaggttaataatcccctatttcttcctgttctaactacattctttttttttttttttttctttgagacagagtttctctctgttgcccaggctggagtgcagtggcaggatctcggctcactgcaacctccgcctcccagattgaagcaattctcctgcctcagcctcctgagtagctgggattacaggcgcctgccaccatacccagctaatttttgtattttttagtagagacggcatttcgccatgttggccaggctggtcttgaactcctgacctcaggtgatccgcctgcctcagcctcacaaagtgctgggattacaggggtgagtcaccacacccagcctctaactacattctttaaagacacagttcatctttttgtagaacaaaaaagtttaattgacttttgacagtcaattctaaaatatactcttgtttttttttttttttttaattttggagacagagtctcactctgtcaccgaggctggagtgaagtggcatgatctcggctcactgcaacctccacctcccagattcaagcgattcttctgcctcagcctcccatgtagctgggattacaggtacctgccacctcgcccagccaatttttatattttttagtagagacggagttttgccttgttggccaggctggtcttgaacttctgacctcaggtgatccacctgcctcagcctcccaaagtgctgggattacagacatgagccaccgtgcctggcctaaaatgtacttttcttactcatacactcattgagttactaaaaatttttgaactccctcaatctctcctatttcttacgtctcgctttcttttaaggagtagacttttatagtagagttgcgttgttttatctatagaaaatgaattgattattttgcctttttcaactttttatttcatgtttcacaaatttgccctttgtattaaaatgctgttgctttgccaacacagcattctcttgttcgaactaattgcagaataagttaagaactgggctctggagctgtctcccctaacaccctgagtttgaatcggtttttcaatattaataaccttaggcaagatacttaacctttccttccatacctctgtttcctcattggtaaaattagaataaaatagtacctgcctcagagtgtcctcaaaaagataaactgagttaatattgcgtaaactacttctaataatgcctagctattattaatgcctaataatgcttagatgtttttattaattattatttaaattatcctatcacatactgaagagctgtgattatagtctagaaaatcaccactagatgactctttttctctttaggaaaaaatataaggctcagagccaagagtttaatttttgaaaggtcatttattttcagctgaggatagaaagcctgtatttctttttaattgcctttcaatgtagagtgaaatcagtttgttcagcatcatttttgaggtgagttttccagttaacaaatgtttaaaaccttaagccccccaattttaacccatttggattcagagctttctaaaatgtttcacacattttccctttactttacaaatggaagatacatatacaacgtcttagtctgtgatattgattacattttaaaatatatatgtgcatataggctgagtgcagtggctcacgcctgtaatcccagcactttgggaggccaaggcgggtggatcacctgaggtcaggagttcgagaccagcctggccaacatggtgaaaccctgtctctaataaaaatacaaaaattagccaggcgtggtggcgggtacctgtaatcccagctactcgggaggctgaggcaggagaatcacttgagcctgggaagcggaggttgcagtgagccgagactgtgccactgtactccagcctgggcaacagagcaagactccatatcattttatatatatatgtgttaaatttatatgtttataaattaaatgtttatataaatacatatttatatataaacatgtaatatattaactccatatcatttaatatgtattatatataatcatatatatgatcatacatatatgcatatagataagacaggagttttcttaaacctgttaatttgtcagggaggtgcagttatgagtgattttttttttctttcaggattatgttactagggcaataaaaggagaaaaaactaaaaaacactgtaattctgaagatcatttaaacttttcttagtaatgcaggatcatcattaaaagtattagtagttggctgggcacrgtgactcacagctgtaattccagcactttgggagaagggtggatcacttgaggttaggagtttgagaccagtctgggcaacatctccacaaaaaataaaaaaattagacaggcatggtggcacacgcctgtggtcctggctactcgggaggccaaggcaggagaattacttgagccagggagtttgaggctgcagtgagctatgatcacgttactgcactctggcctgggtgacagaggaagaccttgtctcaaaaaaaataaaaaaaaaagagtcagttttcttgttggaacatggtttccaaactctgctaattatcaaaattactggtagaactttccttccatacctctatttcctcattgttaaaattagaataaaattctgggttcttcctctagagcagtgcttctcaaactttcaggtacaaacaaatcaccggagaatcttgttaaaatatagttctcattcagtaggtctggggtgtgacttgagattctggcatttctttctttctttttttttttgagacggagtttcagtcttgttgcccaggctggagtgcagtggtgcaatctcgactcactgcaacctctgcctcctgtgttcaagcgattcttctgcctcagcctcctgagtagctgggactacatgcaggcaccaccatgctcggctaattttgtatttttagtagagacagggtttctccatgttggtcaggctggtcttgatctcctgacttcaggtgatccacctgcctyggcctcccaaagtgctgggattacaggcgtaagcctcttcacctggccaaaattctgcatttctaataagctcttaggtgatcatattttgaatagccagtccccaaacttctcatacattagatatgggttgggcctattatgaacattacccagcttattcatttgcctgatgaatcagttttgatccatgtcctctaatcaatgctatagtgtaataatgcctgttaatgtcttagagcatatgggttgttttttgatgtgcaataccccactgtgcctgctttttaaagttcccttaaatctcttcatagtctttccttttgctgttgtagtcttttagtgcatctagtcggctgtgggcatagatactttgtcattaaggccttcactgttcactctattaaaattgtaatgtctccccctactgctgtcctccttaactgcttcatttttctctaggctttttacctgctagcatgctatatatcttccttattttgtttcttgtatatctccctcaactagagtaagagaacagttcactgctttatccccagcacctagattaatcaatatacagcatacaaatggatctcagtaaatattcattgaaagaataaatgaaatgcctcataacaaaagaaaatagacactgtttaaaggcttgagcattttatagtatgtaaatacatgaaccctatagtttatggattctatagcctggatctgttctgtgtccttttgtacatattcccataagctatgttctaaagagaggtgactgccatataattaaactgctgtaatttttaaaattcgataagaattaactttaaatttttttagtatgaatagtagtttataaattgtaaaggatataaatttttctcacttttttattagatagaacagataatatgtccatcttacagatggaaggaggctgatgcctaaagtagttaagtgtgagttcacagaactagcaagtatcaaagataggagaaaagtcttcttccagcattttttagataatgaaaagattctaatatcgcattttacaataaattcaaagcaaagggttttgtcaaatgaatgccaccataatttttataagtggccacaaaattcatggtattgtcataggtcagtacttgatactttttaaaaatatatacatctttgttggccattgtatgtaattcttttcatagttataaaaaagacatttgaataggatagcatttatataaaggccaaaacagacaaatgtaatcttttgtgttagaagtaaggttacttctggaaagggtagtaactgggaggagatggaaaggatttcttgtgttgtgcttagcaatgttgtttcttgaaccaggtatagttatacatagatacactataaaagttcattggcctatatacttataattttgcattttcctccccatgctgtcttatacttcagcaaaaaattttactttaaaaaatttttaaataatgatttaggctataggcattttatatgtgtttatttcttcttgctgcagctgcagaactttaaatattttaaaaattaatctcttcatttggctttttaaaattcagacatgtggaagtagtgagtaggtagtgattttataattttatattttaaaaatatttaacaatttttctttttcctcagcaaagaaagaataataagaaggtgcgagtaacagtgaaaccccatttgctatacagagtaagtttcctatcaaagaattcagagttgttgctttcactttgaatgcatggaaggagcaaagatgttttcagtatattagtatgaaaatttttttgtttattataattaatagctttcttctcttcagcctttagaacagcaacatggagtcattcctgatcgggatgcagaattttgtctttttgaccgtgttgtaaatgtgagagaaaacttctcagttccagttggccttcgaggcaccatcataggaataaaaggaggtaatatcctaatacttgaaatgtcttcaacgtaatttatattgtaaagtaataaacaggcttgtctgttttttatatctaaccagaaagtgactataaatcaggaacaaactaaatctttttatgttttagttaaattttttttaggttatacttttcagagaaaaaaaaatctcttctgttttttattgtataatctggaaagagaytaaaaggagaaactgagaaggggctgctgagaatttagtagttttatatcacattaaaattatgcaagatcttggtgagcatacatatgttttcatgaaactgataattttcattgcttctcctgagtttcattgctcagagctttattttcattgtaatcacttattttctgagattaaatttcattgtaatcacttagtttctgagattaaatatatattacgttagttacagttaaaagacttgaaaattaaatgtgtatattaatttggactttatgaatacaactaaattacatatataaaatagacctatcaatctgttgcacaacagtgtgcatacagttcacattactgtaccatacgcttaaaagtggctaagatggtgaaaaaaaaaatcagagaagggggaaaataaggaagcagcagctaaatatctgaatgtgcccccaaagatattcctggaataaccagctttatagcatagattcaaaaaaagttagtgccagcatgaagcagcatcatgcacccaggagtcagtgtgctggcagcaccattcctctatatatatcccaggcaccgaacctcttggtctcactatcccaaaagtaggaagaacagacgggccactagctgaagagaactgcttaattagtgccagcaatgtgccaggcactaacatattttgcatttaaccctcactatcacccaaggggtgggtgttatttcctcacctgataagttaagtaatcttcctgtgtttacatagataagtggcagagctgggatttgaactccttcccctgattcctacctaaatttgaacagtggttctgtacattttccatttgtagatcctctttgaatcttcctgcccacataactaaaagaattttcttccctaatttttttgtttacttttttggaagactcactattgttaaaatgtcagtgaaatcagttgctttgatttatacagtcaaagaaatcccaatcaagatcccagcagcctgttttgtagaaattgataagctggttgtaaaatttatttaaaaagcaaaggctctagactaaccagaaaaaattgaaaaagaaggacaaagttggagaatttaccctacctgatttcaaaactttacaaagctagagtaaaatttacaaagctagagtaaactttacaaagctagagtaaactttacaaagctagagtaaactttacaaagctagagtaaactttacaaagctagagtaaactttacaaactagagtaaaatttgcactgaaaaacggtgtgaattaatatgaagatgacatatagatcaatggaatataattagagtcccgaaatagacccaaacctgtatggtcaattgattttacaacaatgtgccaggataatttgatgaagaagggataatgtctttaacaaatggtgctgtccccgttagtatagtggtgagtaataagaaaaaaaatgtaatttaatttaaaaatcgtgctgtatatattgaggacttgtttagtgtaaaagaaaaaaaatggtgttggaacaattagacaccatatgcaaaaaaaaaaaatccacaactccttaccttacatcttctatagaaattagctcaaaatgaattgaagacataaatgtaagagctaaaattatagaacttttaggagaaaatcttaataacctagaattcggtaacgatatcttaaataacacatagagagtctgaaagaaaattgccagcctggtgccgtggctcacacttgtaatcccaacactttgggaggccaaggcgggaggattgcttgagcccgggagtttgagaccagcctgggtaacaacgtgaaactctgtctttactaaaaaaattttttttaattagccaggcatagtgttgtgcacctgtactcccagctaatcaggagggtgaggtgggagaatcacttgagcccaggagatcggagatgcagtgagccatgattgcaccactgcactcctgcctggttgacagactgagaccctgtcaaaaaaagaaagagagagagagagaaaaggaagaaaggaagggagggagggagggaaggaggagaagaagggaagaaagaaagaaaagaagggagggagagaaaaagaaaagaagaaaaggccggagcaggagggagggaaggaaaaagaaaagaaaaagaaaaaggccaggggagggatggaggtgggggtgggggcgggggtaggggggacgaagaaaaaaaggccgggcactcatgcctgtaatcccaacactttgggaggccaaggcgggtggatcacttgaagtcaggagttcaagaccagcctggccaacatgatgaaatcccgtctctactaaaaatacaaaaattagagacgggcgcagtagctcatgcctgtaatcccagcactttgggaagccaaggcgggcggctcacaaggttaggagtttgagattagcctggccaatatggtgaaactctgtctctactaaaaatacaaaaattagccaggcatggtggtgcatgcctgtaatcccagctacttgggaggctgaggcggaagaatcacttgaacctgggaggcagaggttgcagtgagccgagatcatgccactgcactttagcctgggcgacagatcgagactccatctcaaaaaatatatatacaaaaattagccaggaatggtggccggcacctgtaatcccagctactcaggaggctgaggcaggagaatctcttgaacacaggaggtggaggttgcactgagctgagatcacaccactgcactccagcctgggcaacagagcaagactctgtctcaaaaaaaaaaaaaaaaaaaaagagagaaaaagaaaagaaacaaagagaaaattgctactttagacttcatcgaaattaaaaaaaaaaaaaactctcttcaaaagacaccattacagaaatgaaaaggcaaatattagcaaaacataaatccaacaaaatgcttttatttagactatataaaagtttttttacaacttaacccaatttttaaaatgatcaaaatagctgaacagatattttaccacagaagatacatggatggcaaataagcatatgaaaagatgctcaacatcattcgttgttagggaaatacaaattaaaaccaaataagatattaccacatacagactagaaagacttgaatttaaaagagtgattataccaagtgttgacaatgatatagggcaactagaactctcctatattgccagtcgtaatgtaaaagataaaaccactttggaaagtagtttagtgggttctttttttctccccccattggtgggctatcatgatgtaggtaagtccttaaaaagttaaacatacatcatagcatagggcccagccatcccattcataggtgggtatttacccaagagaaataagggcttaaatccacataaagccttgttcatgaatcttcatagcagctttatatgtatgtaataaccaaaaactagaaataatctaaatccccatcagcagatgaatggataaacaaattcttggatacatatgcagtggaatacttctcagctataaaaaagaaacaactactgatagacacaacataggtgactctcaaaataattatgctcgaagaagccagacaaacgaggaatacacattatattatttcatttacataaaattctacaaatgtaaagtaacctatggtgacagcagagttttagttgcctagattaggaggattcggattacaaaaggacatggaaagttttggaagtgattatcctatttatcatggctttatggttaattatgtatgttaaaactcattaacttgtatatttcagatatgtgcagtgtatcatatgtcagttatacctcagtaaggctgttttgttgttgtttggtttttttttttttttttttgagacggagtctcgctctgtcgcccaggctggagtgcagtgatgcagtctaagctcactgcaagctccacctcccgagttcatgccattctcctgcctcagcctcccaactagctgggacaacaggcgcctgccaccatgcctggctaatttttttttttattttttatttttagtagagacggggtttcactgtgttagccaggatggtcttgatctcctgacctcgtgatccacctgcctcggcctcccaaagtgctgggattacaggcgtgagccactgcacccagcccagtaagactgttttttttttttwaaaaagtacatgccctaagacccagcagttttcacttttaacctagggaacattcacctgcataaaggacacatttgcatgttcattgtagcattgtttataatagcaaaagttagaaatcacctaaatgtttattggcaggagagtggataaattattgtatacccatagatgggatactatatatccagaaaactgaatgcacatgtttacgtgggtgaatctcacaaatataatgttgaaagaaaaataagttgcaaaataatatattctctatgatatcatgtatatgtttcaaaacttgcaaaacaatactatgtattattcatagatacatatgtatgtagtagaagtataaagaaacataaggaatcataactgccaaattgaagataatgttacctagttgggaattgggacaataatgatcctctaaggcactggtattctgtttcttagcttatataatgttccttatattaatattatgccattgttcatatcctgaatattttatatcatatctagaattttataataaatacttccaaacactccaaaaacttatctgttgatttttcatcatatgattttttagtgtctctttttctctccctattgtaacagctaatagagaagccgatgtactatttgaagtattatttgatgaagaatttcctggagggttaacaataaggtttgtatttcccaatgataattgccctttgtgaatatgttcatgtggccagtgactttacattactttttatttgtttacaatttcagtttgtgggatgtgtaagacgtacttgctactagggatgtaacactgaataaggcagacatgctttctaccctcagagagctttcattttagtgagggaggtaattaagcaaccgattacattattaattatttaattaaagcatggcaagtgctaggaagaagtgcaggtttttataaagagtatgacccatcctgagagtaacagaaaggcctctttgaggaagtggtatttaagatagaacttgaagaatgaataatagctaaccagggagaaaaggggggaataatgacatttgcacaggaagagggaatagcatatgtaaacaatgctattagggttaaataacttgaggaatagaaatgtcctttgaaattagtgacatgtatgtctttgtcaccaattttagtggagttgtaggtactcacgacagattggcatgatttgacaagtgaatggcaggtgtagtaatggagacaggaaattgaggcaacacttgggaagtttgactataaaggaaaggagaaagttaactggaggttaggaggtttaaaggaagagggttaaattgtttttaatttaacacagataagacaagtgttttgggggaaagtgccaatagaaagtttaaagttataggaacaagtatcatgataaaatgagaggcaccatggtgtaaacttgcagttaaacgttgtatttccttgggtaggttaattaagtgtctgaccctcaatttcctcatctataatgaagatatatacatacttccctaggttattgtgaggatgagatgaaatcctttccagttttctgctttctaaaaatcagctggaaaactgaactgaatttagcttagtttccttttttcctctattttgataagtgagtaattaaaataaaaaattaattacccttttttaacctccttacatgaactcacagtctttggctgttataccaagtagtcaccttcaggatgctattattattgttttgcaacttaaatatgcttgttattcaaagacttttccggtctacactcttcacatacagcagcagaatccggatctcctgtctgattttatttttcatgaaagtgtttgattaccaatacctttgattcactaactttccaaaatatattttaagtatatttttgtggttttttcccccctctcctagtaagggacagtgaatttactgactgatagagagctgggtaaaagattacctgcctgcagtgtattcatttctgtaatacagaatctttagtaagtttagttctcatgaaaatagatacttcctagcaaccttgaacttacaaaggtttctcatagaaatctacttttccactttctttcaatataagaaaattatactctcaaagagaaaaaaaataggtgatagagttgaaaacttaacaagagaaggattctttaatatctgacacgtttatcaaagccatgaaagatggaaatcacwaatacttgtctcttaagcctttccaggtacaggcccagaactttaagatgggaaaatgagggaaaaaagggctggactccacatttgaccgatagacaaatgagatcaaagctgacatttaccctgttgcttaggaagagctatactgagaatggttccatgctcctgagctttcataacctagactgcccaaaccatagttttcgtttttttgtttttgtttttgtttttgttgttgtattttgttttttgagacagattctcacactgttgcccattctggagtgcagtggtgcaatcttggctcactgcagcctgcatctcccaggttcaagcaattctcctgcctcagcctcccgggtagctgggattacaggtgtgtgccaccatgtctggctaatttttttgtatttttaatagagacagagtttcaacatgtttgccaggctggtcttgaacttctgacctcaagtgatcgacctgcctcggcctcccaagtgctgtggctgggattacaggcatgaaccaccatgcccgctccacagtttttaagacgttcgaggccaggcatggtggctcatgcctgtaatcccaacactttgggaggctaaggatggagggtcatttgagcccaggagttcaaaaccagcctgggcaacatagtgagaccctgtctctaagaaaaaataaaaaagcatgccagttgtggtgccttgcacctgtggtcttagttactcaggaggctgagatgggaagactgcttgagcccaggagttcgaaactgcagtgagttaggatatagcaccattgcactccatcctgagtaacagtgagatctcatctctcaaaaaaaaaaaattaattcataaattttcagttgtattcagcaattaagatgcaagcttcttaacgacaaatcgacacacacccctagaacatagttgggttttctctacttagtaaatactaaatatgctcttaggaaagtttttagaaatacatcatcttataaattgagctattgctgtgatttgaggttcctctaccgaattaaaaagtaatatttactaaygctgatgatggattgtccaccaaaaattatttgacttttctccctaacacatttagtattgttttccttccaaccctgatataacttttacttttagatgctcacctggtagaggttatcgactgccaacaagtgccttggtgaacctttctcatgggagtcgctctgaaactggaaatcagaagttgacagccatcgtaaaaccacaaccagctgtacatcaacatagctcaagttcatcagtttcctctgggcatttgggagccctcaaccattcccctcaatcactttttgttcctactcaagtaagactctcagtctttaacttctcctctaccccttttacaaatcacaaatcacagcagactttgtaaatgtaaacctaatttaacttagtttccctcttttatttaaaaagttttggctcaggtcaattccaaatttaagatactaggctaataaagaatgctattgctagcattctacctctgctataaaataacagttgtattaaaggaaaaaagtgtatttaaataaggaacttaagaatgtcyatgctttctctgtaaatgtttacatttcaagttaacatttaatttttttcttgtataatccaaatgtcctatgctatctgctataaataacataaatttgaaagataaagggcaaggattatatcacgtttatcaaaagcaattttcaagtttctaccatacaatttatgggtgatttcctttatttcctctttctggggacaaaaattgagttgtcttgtgtgagacactttatttaattccatgaccccaaatctcatgcttattaagtacgtttttttaacccaaatagtacctgcttattataaaccaattggaaaacacagataagtagatgataacaaaggaaacacaagcaaaagtcctctaaaatctcataggttaccactgtcaaaatttggtgcctatttttccagagttttaatcttaatagttgatatttaaatttattagattattttgtgtaaggtgaagattttaaaaataaaatctttaggtgtcaatttgagtgagagaatgtattttaatacattagaagacaaaaaacctattggtgggatattgattcagtataatcttttatagtgtttgttatgctttaaatatttttcaacaaataaaaccattcaaaactaattgcatataaagaacaccagtttcactctcatagaatacttttgtgattactatgctgagctttagaaaaaaaggaactaagagatttcacataatgaaagttagtttaggggtggacgtggtagctcacatctgtaaccccaacactctgggaggctaaggcaggaggactgcttgaggcagtagttcaacaccagcctgggcaacacagcaaaacatggcaacccatccctagaagaaaaaaaaaaaatagttgggcatgatggtacacgcttgtagtcctagctccacaggaggctgaggattgagcccaggaattcgaggttacaatcacctatgaccccaccacagctccccagcttgggcgacatgagcaagaccccacatgagtaagaccccaagtcaaaaaaaaaaggtttaatatcctgtctaccactgaataacattaatagatgaattatttgatttttaatatgtatttttatttcttcctatttcattttctcaagaaattgtttgtactttgctaggtacctactaaagatgatgatgaattctgcaacatttggcagtccttacagggatctggaaagatgcaatactttcagccaactatacaagagaaggttagtattccttgttttgatggacaattaatttaaagaaaatatatttttatatttttcttttaagactacaatgattatttttctgtgacatctcataaaatagaaaatgacaattttgatcatgaattttctttttctttttttaaataatttcaactttatttgttttaggttcaggagatacatgtacaggtttgttacatgaatatactgtgtgacactgaggtttagggtacaaatgatcctgtcacccaggcagtgagcatagtacccaataggtggtttttcagcccttcccccctcctccctatcttcccccatctgtagtaacccccagtgtctgttattcccatttttatgaccatgtgtccccaatgcttagctcccacttataagtgagaaccatatagtatttggttttctgttcttatattcattcacttagcataatggccttcagttccacccatgttgctgcaaaggatgttatttcattcttttttatgactgcatagtattccatagtgtgtattctgtggtgtatatataccacatttttaaaaatctggccgggcactgtggctcacacctgtaatcccagcaccttgagaggctggggtgggtggatcactggaggtcaggagttcgagaccagcctggccaatatggtgaaaccccatctgtactgaaaatacaaaaattagccagctactcgtgatggtgaggcacaagagttgcttgaacttgggaggccagaggttgcagtgagccaagatcgccccatttcactccagcctgggcgacagagtaagattcagtctctaaatcaatcagttaatcaatcagtcttatctaccattgataagcacttagattgagtccatgtctttgctattgtgaatagcaaatgcaactcatatatgtgggtatgtgtctttttggaagaacggtttattttccctggggtatatacccaacaatgggattgctgggtcgaatggtagttctgttttaagttctttgagaaatctccaaactactttctacagtggctgaactaatttacattcctaccaggagtttataagcattcccttttttctacagcctcaccagcatccgttattttttgacagccattctgaccggtgtgagatggtatcgtcttgtggttttgatttgcatttctctgataattagtgatgttgaacatttttttcatatgtttcttgtccactgatatgtcttattttacaaagcatctattcatgttttttccccattttttaaaaattaattttttaattaaaatataaattttcttaagattttgctaatcttctctgtaccattccaattttagtatatgtgctgctgaagcaagcatcttgtgcccatttttaaatggcattatttgttttttgcttgttgaattaagttccttatagattcttgatattagacctttgtcagatgcacagtttgcgaatattttctcccattctgtagttgtgtttactctgttgataatttttttagcgagcagaaactctttagtttaattaggtcccacttgtaaatttttggttttgttgcgattgcttttgaggacttagtcatacattcttttcaaggctgatactccaagtggtatttcctggattttcttctaggattcttacagtttgaggtcttatattttaagtctttaatccatcttgagttaatttttgtatatgctgaaaggtaggggtccagtttcattcttctgcatatggctagccagctatccagcatcatgtatagggagtcctcaccccattgcttgttttgttgtctttgtcaaaaatcaggtggttgtaagtatgccattttatttctgggttctctattctgttccattggtctttgtgtctgtttttgtaccagtaccatgctacttttgttacatggcagatacatggtaatataaacttacagtataacgtgaagtcaggtaatgtgatgtctccaacattgttctttttgtttaaaattgccttggctattgggcttttttctggttccatgtaatcatgaattttcataattattttcagaccttagtttctggaccaatgagtcgagagtatagataatttttgttttaaatcagctttagggtttttttagttatttacgaagtcatagtaactatattttaaattcaacaaaggccgttatcgcatttaacaacttactttttccacttgaatgtgtcactttatgctggtagttggttatcttaaatatgaatgaacaaatatgyattccttggtagagattaagaagagagaaaaagtgctgctaaaagattagagactcagacaaagaaaggaagaggaaaggaataaattcctactacatgttttgctagttacctatcttctcagcttagatcaaaaaggaatgtttggcgaggcgtggtggctcatgcctgtaatcccagcactttgggaagccaaggccgaaggattacttgaggtcaggagttcaagaccagcctggccaacatggtgaaaccccatctctacaaacaatacaaaaaatcaatcaggtgctgtggtggcacacatgtgtagtcccagctactcagaaggctgaggcaggagaatcacttgaacccaggaggtggaagttgcagtgagtcaagattgtgccactgctctccagcctggatgacagagcaagactccatctcaaaaaataaaaaaaggaatgttcaagtttataaaccagtagcctgtaccttcagaccctcatttattctaatgtcctgcagtaatggtggcattatcagagataaaagagaaaattacaaagggaatataaacataaatggtaaaataaatataaataataaaataaacataaaaaattagtgtatatgtcataacttaaagaataaagaaaaaaattaaggtgacaagatacgtagttctcctcagccaatatgctattataagctttctttaggttatctataaattattttgttttaaactatttgaatcacaaaacctgatttcctgattctgagtccagtactgtacttactgcaccacactgcttcagggtataaactgggttcaaacccaagagatactttgcccaattatgccttggggccaaaacagatgacagggtctttaagaaagattaatcaggcagcagtatgtaagaaggactatatgtgaaaaagataggaaacaagaatcgtagttagaaggttaatttaggccaaggatgacgatctaaagtccagttgcaggaactgaggaggagtagaatgatagaatgatttataatatcattgtaaaaataatgttagaaagcaaaaatttttgactctaagcattttagattatatgcctgaggaatggtggtgttagaaataagggtaagaggagtaactttaggtgaggccgattctgggaccttttttttttttttaacttaaaaaaaaatgttcttcttctctcatgctgccttgtctaagatgggacaccttgaggttgaggtgatggtggagtatccagctgtgatatctgtcctagaaagttgcagatactggattaaatcttgactgaggttcaaatcagagatatagattagtaatacttagcagagaggttacagtcaaagtcattagtcaagcagtaaggcaaaaaatgaaaagaaaactgttgttggatttggaggaacattcctcagtaaaagattaagagagcgggagggagttaattaaaaagttgaacaaatagataaaggcaagaattgcttccttttagaacaaaacttgaaaaaattgtctatactggcacctctctccccccttctctcttaaacccaccctaatcggtctttcattcccatcactttatggaaactgccctttcaaggttcccaatgacctttgtgtgcaaaaaccgtgtgatcaagtctcagtttccatctgaattgacccatcagcagcatttcatacagttgatcactcagttctccttgtcatccattcttcacttgtcattggaataccacccttccctgtttttcttcctgtctcattggctgttgtttctcagtcttctttgtcagtttcacctaaactctcgggctctttaaagatggaatcctctagggctaaattattggacttcttctgtatctatacccatttccatagayagatagatagatagatacatagatacatagatagatacatagatagataattatagacagatagatagatgatagagaaaaaaatagatttagataagatagatatagatacacacacaaacatatatacctacaaaagtacatacatcatgtctcccaaacttctctttccagcttggaagtcctccatgatatttagactcagtgttcaacccttcatctccactcaaatgtccaactctatgtctccacttgggtacttaatatacatctcaaattaccatgtccaaaattgaactcttgttcttccctcacaaacttacgttacctaatgtcatttccatctcagttaatagccactccctcctttcactcagaccttaagagtcacatcctttactccttcctttctcttttaccctcatatccaattcattatcatatgtaaatctctttcaaatatgtctagaattggaccatttctcacaggctcctactaccctactccaaattcataccaactctcaccttgatggttacagtagtctagtaatctgcttccatcctggctcctctacagtctattctcaagacagcaggcagagtgatgctattaaaatatgtcagagatcatgtccttctgctgctcaaaaccctccactgattccccgtttcactgagtaaaagccattatttttatataatggcctggaatgtcccatacaatattgatgtgtcacctctctaatcacattttctataactcacatttttgctacagccataatggtcttctttctcttccttgagtatgccagggatggtccccacaacagggcctttgagtttgtctggaatactctctctcctcagagagaggcttatttccctaggcttctgtgtcctcatgtatacaatgaagttcacttagatgacctctaaggtcttttccagccacaaaatagtattgctgtagtactctggaatatatacagctccagggttggaatcctgcctcaactcctcaaactaatgtctaaggccttctataatctaaccccacctaattatatgatgtatgtccaaccatttggacataatagtctgttctagttagactggtctctttactttatctttcccacagatgattcccatttggggttatgtgttctttttgttccttccacttagaatgcccattttttctctcactacaaataaccccctaggtctcagtcaaaatctcctatttccttgagaatcacttgatattatattttctcattatctcctacatgcaacccctcttacttggtgctatttcattgtttatttcagctgaacactctcatgttttatctcttaaatgtcctaagaattatgagatcccaagtataacgcatatgcattaataagcagcctaacctgatgagcaaattcaagagaattcactgtgataagaaatattcaagctttcattggcaaaacatggcaatgtgtacaaatacctttatatagatatcaaacagaacaccctaaagaactatacccaaatatttgcttactaattaaacatatggcttaccttttctctgaagtagtactgtgaacatggattttggagttagagctccaaaataatgtaaataataatattatattatttactatttattttactatttagttagtagcattactataatgatattaaaataatgggtacacagttcatttaccatacctggcacatagaagacactcagacaatacttgttctatcctgatgttctaattcttctccttagagtcaaaatcacccataatgtactgctgtagtccaaagccccaccagccattgtgccatgatgatagaaatctcatgccattttgactcttaataactgaaaagctggccgggcgcagtggctcacacctgtaatcccagcacttttgaaggccaacgcaggtaggtcactggagcccaggagttcgagaccaacctgggcaacatggcaaaatcccatctctacaaaacaatacgaaaattagccaggcatagtggcacatacccatagccccagctattcgggagactgaggcaggaggatcacttgaacccaggagtcgaaggttgcagtgagccaggatgaccccactgcactgcagcctcagtgacagagcaaacaccctgtctcaaaaacaaaaaacaaaactgaagagccttgggctgggcacagtggctcatgcctgtaatcccagcactttgggaggccaaggcaggaggaacacttaagcccaggagttcgacaccagcctgggcaacataataagatccctgtctctacaaaaaaaataaaaaatagatttttaaaaaactgaagagtcttgagtgtttctgtccatgtgatctcattaggtcttccttggtactcccatgcatatcacaactattttggagcatgcccactaccagttaggacatgttgtgtctttgtacccagtgtccatttgtctgtgctgataagaaagtaaatagagcctaccaaaagcaaaacggtgaaataattcatttgtattgaccttctctagcctccacttctgctgcttcttgttgcttcaactgtgggaaattgtctatctctttttgcattcaggctttctctccctatccaaaaatgaaaggatctgatagaatcttcatatgaaatttatgccattttgctaattctgtctatgaactgtctcaatcactgtaactttatcatcagtctggctatttaatattgaaggcttccaacatttaaaaaccttgacaatataaatattaataaaaatcaggtattgggattgttattaatcccaataaaacatgggattaataaaaattaacatggaagggaatgtaagtgtgctaacatcctcaattttcataatgtagagccagaaatgataaattttttaaaactttttaatggaaaagtttaaccataatgacatcaagtaaatagaatgaatgaacccaccagtattcattccctgccatgctctagtccagtactatttcttctataacccctactcatttcccacctccacctacccaagggatgggattattttgaagcaaatctagggggatctttagagactgatatttctctaaaggtgaagaaacatttacctaaagtttagtattttgtttggtttctgcatttgttaacatcaagcaaaattagatttaattcttttattgaaaggaggatttttggctgggtgcagtggctcatgcctgtaatccaaggactttgggaggccgaggtgggagaattgcttaaggccaggagtttgagaccaccgtgaccaacatggtgaaaccccgtctctactgaaaatacaaaaactagccaggcacgatggtactcacgtgtagtcccagctactcagaaggctgagtcatgagagtcacatgaacccgggaggcagaggttgcagtgagccgagattgtgccactgcacttccagccttggtaacagagcaagaatctgtctcaaaaaaaaaaaaagtagcatttttataaaatgattgttttctttatatcttgcaaactaatgcatagaaaaaatatctagagtgatgatcattatgttaatgagtctggtgatagagttcaagtggctttaaaagtctctatacttttctgtattaagtttttttctaaggaactatataatttttataaaaatgtatttattaaaagttgaagataagaagtagttataatattaagattttgtttaatttataagaattttaattttcagggtgcagytctacctcaagaaataagccaagtaaatcaacatcataaatctggctttaatgacaacagtgttaaatatcagcaaagaaaacatgaccctcacagaaaatgtaagttttaaattagaaaggtgtacttgtgtgtgctgcttcttttttaaaaaaataaacattttattgatataatttacataccataaagtaaattcattattttaaagtatacgataagtggttttttgtattttcacamaattgtataaccaacaccaccatctaaatttagaacattttttgtcacctgaaaaagaaacaccatacctattagcagtcactcctccaggccttggcaacccatagtttactttctgcctctatggatatgcctattctagacacttcatataaatggaatcagaaaatatatgaacttttatgactggcttctttcacttgtgtattttcaagatttatctatgttgtagcatgttcagtcggccctctgtacctgtgggttccacatccatggattcaaccaactgaggatcaaaaatattcagaaaaggcagggcacggtggctcatgcctgtaatcccagcactttgggaggccaaggcaggcagatcacttgagcccaggagttcaagaccagcctgggcaacatggcaaaaccctatctctaccaaaaatacaaaaattagccaggtgtggtggcatgcacctgtagtccctgctattcaggaggctgaggtagaaggattgcttgagcctggggggcggaggttgcagtgagctaagatcagccactacactccagcctgggtgacagagtgagaccccttctcaaaaaaaaaaaaaagaggatgattgtgtctgctctcaacatgtgcacactttttaatcttattattcccctaaacaatacagtatgacaactatttacacagcatttacattgtatcaagcattataagtaatctagggattatttaatatataaagagtatgtttgtagattatatgcaaatactacactattttctgtaagggacttgaacatatgtggattttgatagccacaggagggtcttggaagcaatcttccacagatatggagggacaactgtatcagtacttcatcctttcttatggctgaataatattccattgtatgaatgctacattttatcggttcatccatttgtagacatggaggttgtttccacattggggctatagtgaataatgctgctatgaatatctgtggaaaagtttttgtgtgaacatatgttttcagttctcttgggtatatgcatatgagtgaaattactgagtcatatagtggtaactcttaagttcagctttttgtataactgccgaactgtttggatattaccattttacctttgcaccagggatgtgtgaaggtccaatttctccacatccttcacaacatttgttattgtccctctctttgacaatagtcgtcctactaggtgtgaggtggaatgttcttgtggttttcatttgtaatttattaatgactaataatgttgagcatcttttcatgtatatcatctttggagaaatgtcagttcaaatccttggttcattttttaattggattttttaatcttttttcttggtttgtaagagttctttatacatgctagatattacatgcttcttggatatgtgatttgcaaatattttctcccattctgtgggttttcttttaactttctttatactctattgaaacacgaaagttttaaattttgatgaagtccaatttgtgtattttttctgctttgtctttggttgcttgtaccttaggtgtacatctaagaaaccattccctaatccaaagtcacaaagagttacagtgtgttttcttctaagaattgtatagttttagcttttagatttaggtctctttccattttgagtaaaagtttatacatggtatgatgtaggagttcatattcattcttctgcatgtggatatccatttatccaaacattgtttgttaaaaagactactctttccccattgaattttcttgacaccccattgaatagtcttggcacccttgtcaaaaattatttggctatagagccaggcatgcatctgtagtaccagctgcccaggagtctgaggcaggaggattgcttgaacccaggagtttgagtccagcccgggaaacatattaagacaccatctcatttttaagaagtaattgactgtagatgtatgggttcatttctggactctcaattccattccactaatgtatatgcccgtccttatgtgaaatacacagtcttgattactgtagctttgttgtaagttttgaaatcaggaagtttgagccctctttgtttttctttttcaggattgttttctctattctgggcctcttgcatttccatatgaattttatgatcatcttgcctatttctgcaaaaatggcagctggaatttttatagggattgcattgaatctgtaggttactttgggtagtattgtcatcttaacagtattaagttttcctgtccatgaacacaagatgtctttccatttatttcggtctttaatttctttccatgatgtcttgtagttttcagttatgcaagtcttacacttttttgttaaatttattcctaaatattttactctttttcatgcttttttcaatggaactgggtttttaattttattttttgattgttcatttctgttatagatataaaactgatttttgtatattgccttaactgtttattagccctaattttttgtggcttctgcaaatagagatagttttactttttcctatataatctcaatgccttttatttcttttgttgcctaattgctgtgtttacaacagctagtacagtgctgaatagaagtggtgagaacatgcatccttgccttttatttgttttttatcttttatttttaatttttgtggatacatagtaggtatatatatttatgggttacatgagatattttgttacaggcatgcaatgcataatgatcacatcagggtaaatagggtattcatcacctcaagcatttatcttttatgttagaaacaacataattatgttctcttatttatttaaaaatatacaattatttttattatagtcaccccattatgctagcaaatactaggtctaattcatctatttttttgtacctgctaaccatccccacttcccacccctcccccccactactcttcccagcctctagtaaccatccttctactctattttcatgagttcagtcgtttttaatttttagctcccacaaataaatgaaaacatgtgaaatttgtctttctgtgcctggcttatttcacctaacatatgatctccagtttgatccatgttgttgcaaatgacaggatctcattctttttttatggccgaatagtactccattgtgtatatgtaccacattttctttatctgttcacctgttgatggacacttaggttgtttccaaatcttagctgttgtgaacagtgctgcaacaaacatgaaagtggagataatctctgcaatatattgatttcctttctttggggtatatacctagcagtgagattgctgaattatttggtagctctatttttagttttttacaaaacctccaaattgttctccatagtgtttgtactaatttacatctccaccaacagtatacaggggtacctttttctccacatcctcaccagcgtttgttactccctatcttttggataaaagccattttatctgcggtgacatgatatctcattatagttttgatttgcatttctttgatgatcaatgatgttgagcaccttttctttttttcttttttttttttaagacggaatttcgctcttgttgcccaggctggagtgcaatggtgcgatctcagctcactgaaatcttcgcctcactggttcaagcgattctcctgcctcagcctcctgagtagctgggattacaggcgtgtgccaccacgcctggctagtttttgtatttttagtagagacagggtttcaccatcttggccaggctggtctcaaactcctgacctcgtgatccacatgcctcggcctcccaaagtgctgggattacaggtgtgagcgcctggctgagcaccttttcatatacctgtttgccatttatgcctcttgttttgagaaaagtctattcgaagcttttgctcattttttaatgagattatgagatttttttcctagaaagttgtttgagctccttatatattctggttattatccatcttgtcagatggatagtttgcaaatattttttcccattctgtgtattgtctcttcatgttgttgattgtttcctttgctgtgtagaagttttttaacttgatgtgatcccatttgtttatttttgctttggttgcctgtgcttgtgggggactactcaagaaatctttgcccagtccagtgtcggagtttccccaatgttttctttgagtactgtcatactttaggcttagacttaagtctttaatccattttgatttttgtatatggcaagagatggaggtctagtttcatttttctgcacatggatatccagttttcccagcaccatttattgaggagactactctctccccaatgtatgttcttggtgcctttgtcaaaaatgagatgtgtggatttatttctgggttcactgttctgttccaccggtctgtgtgtttgtttttatgtcagtgccatgccattttcattaccatagttctgtagtatgatttgaagtcaggtaatgtgattcttccagttttgttccttttgctcaggatacctttggctattctggggtttttgtggttccatgtaaattttaggattgttttttctatttatgtaaagaatttcattggtattttgacagggattgcattgaatctgtagatccctttgagtaataggacattttaacaatattgattcttccagtctgtgaaccttggaatatctttctctttttttgtgtcctcttcaatttcttgcatcaatgttttatagttttcattgtagagaactctttggttaattcctaggtaattagttttatctgtagctattgtaaatggaattactttcttgatatctttttcagattgtttgccgttaacatataaaaatgctactgatttttgtatgttgattttgcatcctgaaactttactgaatttatcagttctgatagttttttggtggagtattcaggtttttccaaatattgtttggttcccatctggaaagtcwgtacaatgctgaaagtggaatcttgacgtatccagctattactatatttggatttatctctttctttagctccagtaatatttgctctatatacctgggtgctccagtgttggaaatatatttttttacaattgtttttatacagttgttatatcctcttgctgaattgacctctttatcattatataatgatcttccttgtgtcttattgtttttgtcttgaaatgtattttgtctaatataagtatagctaacccctgctccattttggtttccattgacattggataactttttccatccctttatttgtctgcatgtgtctttataggtgatgtgtgtttctgttaggcaacagatcattgggtcctttttttaatccattcagccactctatgtcttttgattagagtttagttcattgacattcagtgttattattgacaagtgaggacttcttcctgccacttcgatatttgttttctggttgttttttggtcttcccttcctcctttcctgtcttccttttattattattcttccttttattattatttattattcttccttttgttattattgacaagtgaggacttactcctgccactttgttatttgttttctggttgtttttggtcttctcttcctcctttcctagcttccttttagtgaaggtgattttcactagtggtgtgacataatttcttgctttttattttttgtgtatctgtttatgttttttgatttgaagttatgagtcttgcaaattctcttataacccattattttaagcaacttaacacttaacaacactgcttgcataaacaaaaagaaaactaataaaaaatctataatttaacttcatcctcctgcttaataatattttgctgtttctatttatatcttattgtattgtctatgccttgaaaagttgtcatagttatttttttcattggttcatcagttataagagtagtttacataccatacagtgttatgtgtttttctgtgtacttactattatcagtgagttttgtgccttcaaataatgtcttactgctcattaatgttttttgctttctgaataaagtactccctttagcatttcttgtaggacagatctggtgttgatgaaattcctcagcttttgtttgagaaagtctttatttctccttcatgtttgaaggatattttttgtcagatatactattatagggtaaaaaattttttccttcagctctttaaatatgtcatgccactgtcttctcgcctgtaagatttccactgaaaagtctgctgccagatgtattgtagttccattgtatgttatttgtttcttttctcttgctgctttatgatcttttctttatctttgacctttgggagtttgattattaaatgctttgaggtagtcttctttgggttaaatctgcttagtattctataaccttcttgtccttggatattgatacctttctctagatatgagaagttgtgtgaaattatctcttcaaataaactttctacccctctttctctaccttctctttaaggctaataatcttagatttgcccttttgaggctgttttctagatctcgtagacgtgcttcattctttcttattcttttctcttttctcttctctgtgtgtgtggttgtttttgagatggagtttcacttttattgcccaggctggagtgcagtggtgcaatctcagctcaccgctacctccgcctcctgggttcaagcaattctcctgcctcagcctcccaagtagctgggattacaggcatatgccaccaagcccggctaattttgtatttttagtagagacagggtttctccatgttggtcaggctggtctcgaactcccgacctcaggtgatccacctacctcggcctcccaaagtgctgggattacaggcatgagccactgcgcccagcctatatattttcaaatggcccattcaagctcactgattctttcttctgcttaatcacttctgctattatgagactctgatacatttttcagtatgtcagttgcatttttcaactccagaatttctgcttgattctttttaattatttcactatctttgtgaaatgtatctgatagaattctgattctttctctgtgttatctagaatttctttgagtttcctcaaaacagctatttggggattttgtttgtttgtttttgttttttgtttttgtttttgaggcagggtcttgccctgttgttggagtgcagtggtactattacgtctcactgcaggctcaaccgcttgggctcagtcagtcctcccacctcagcttcccaaagtgctgggattacaggcatgagccaatgcacctgaccaaaacagttattttgaattctctgtctgaaaggtcacatatctctgtttctccaggattggtccctggtgccttactgaatttgttgaagtcatgttttttgctggatggtcttgatgcttgttgatgtttgttggtgtctggggattaaagagttagatacatctcgtagtcttcaaagtctgggcttgtttgtagcagtccttcttgggaacactttccaagtatttgaaatgacttggattttgtgatctaagccacatctgcattaaggagcacacctagaccaataattctgtggttcttacaggatcagaggtgccatcttggtggtcttggagaagattcaaaagaattctccagattcccaggcagactcttgttctcttcctttactttctcccaaacaaatggggtatctctttctgagccacctgggcttggggatggggtgacacaggtacccctgtggccaccaccactgggactgcactaggtcagacctgaagccaccacagtactggatctcgcccacagcccgccatacctggctgtcaacctgtgtttactcaaggtcctagtgctctataatcagtagatggtgaaaccagccaggcttgtgtccttccctttagggaagtgtgttcccttaggtcccaggtagatcctgagatgccatccaggagacagggtctgaatttaaaaaccttagaaatctgtgttgtactgcagctaagctggccctgaaaccttgagccactacccttcccactcttcccttcactttctgcgggcagaagagtatttccccgtggccgtcaccaaccacacgcccatggggagtactgctaggctgttgctgatgaactcccaagggttcttcagtcagcttgtgataaatgctgcctggcctgggactcacccttcagggcagtggggttccctctggcccaaggcacatctagaaatgccatctaaaaaccacaccctggaattggggaccctgagagcccacttagtgctctgtcccacttggcagagctggtacctaagatgcagacaaaatctcctttacttttccctctgcttttctcaagcaggactctctcagtataatcaccacagctgggcatgtgctgggtctcttatgaagccagcatgtctcagactcttatcgaaggcacatggatactacctggtatcgctgctggttgtttcagtcccaagggttctttagttaacaagtgatgaatcctgccaggactgggttcttcccttcaggactgtaggttcccttctggcccagggcgtgtctagagatgtcatccaggagtgctaaggcctgaaatggggtctcatgactctgacacaagcctgagttggtatccaagatacaaaagtcctctttactcttcccttttctttcgtcaagtggaagagagggatgtcttttggagcctcaagctgtgttgcctggggttgggggagttggggaagtggtggcacaagcacttccttagctgccccagcaagagtctcagtaagtcacatgcctagcaagtaaaaggctgcaagcccaactcaacactaggacgtgtagtccttgtggcctggacagcctttcaggtttatttaaggctccaaagcacttcagtccatgggggcaaggcttgcaggtactcaagttcccactgtcttttttcttgaataaacactccctagattgctgcaagcctttggttaacttctgtggttctgaaaatatgaattctgctaatttatgcccattctcttgttgattttatggaggagagaatttttggaggtccttactctgacattttgctgatgtcccttccctaacaacttgagataaatcttagagtgatccagttacttttctgcttataaacacttgcctattatatactccaaattatattacaggcttttctttaaaataggtgcaaatattttgttaatattctctcacataatttatatgtttatactctttaaatttcttcagtagtgtctactgtgttcaggcacagttgggaatgagaatcttcatcctgtagtaattatttctcttcccttgaccaaaggatttccaaattgcagaaaattattctttatgttcaaaatatgactcatttgttattcgtttatttattcaactactatttattgagtacaaggcactgttctagatgctggggatacatgactaaaaaggaagacaaattttctgacctcctagagtataatggagtttacactctaagatgaagactgataataagcaagtaaacagtaaattccataatctgaagtaataataagtgctatgatgaaaaagtaaaacagattaagaggatagagtgacaggggtgctcttttaaattgggtttacaagaaaggcctttctgaggagatgagattccagcagagaccctaataaagggctcaggaaggcatgaactatgcaaagctggctgaagaactttccagtagaggaaatatcaagtgcagacccctgagtctaacttattatattttatatatgcatggtattttatttatctatatattataggtattaaaatcttttaaacatttttctaaaaagctattttcaaaaaaaattttgtggtttttaactttggttcagtttggtaagtgctatacctttttttaataccagtatctgtatgttattttggtttattttactctttaagttaaatacagattaatgtccctgtaaatctgataatgataaatatagcataaaggtgttatattcaaatggattttaatttttctccaaactaatatttacataaatgtatgtaaactatttgagttatgtggagttccagttagttttcttttgtgtatgtctcaacaaatgtttagtgttaatgcttgtcagctcacattttcttttcctttgttttgtaagattactttcttcccttcctctcttccttacctccattaccttcctttactccccttcctccccttctcttttcctctctctctattccttctcttacccttccttctcccctttgtccttccttcccctgtctctgatctcattccctcctcccatgccctcctcactattccccttcccctgcttctttcctcagcctctctttcttttttaatattgcctccctccctcccttcccttccttccttccttcctttttcctcttctctttccacccacctttttattttttcagactggcttaatgaacagtctagtgatagaaagtggtaaaaataagttatagtagatctatatagctatataatccagtatatccaatataatagaatattatgcaataattacaaactatgctttttgtgcttcttcatatctacctcatgcccctcatatttttcatcttcatattctgtcatttaccaaatcctatgaaaataatctctcaaattcatcctttcctatctccttcatcttcacatcctgtcatttgctaaatcctagaatttttcaaattcattcttttcatttctcctaccatcccccaatttccccttaacagaactattaaaatagctgcctgagttggtcttgtactattcttctatttagccaataggctatggccatattttaatcgtcctaaagcacagttctcatcagattactacctgcttaaacctttctgttactggctgcccatttcctaccaacttaatataataccgtagtcttcagtgacttgcagattatggctctaacctgcttttttagttctctcaagctccattttacccttaacttccagtggaacttgctttctgcttccatgtcttttttcccactatttgctttgcctggagtacttaacttcttagtctgccctttagaacctacctccttcgaggcccaattcagatgccacctttccattttctctattattatctaagtgtctcttctcccccttatctatgttataaattccttaagttcagagactgtgtcttgaaattctctgaatttttaacacagtgccttgctattataaatatttggtagttttaattgtgcagtaaacacttccatttatgaaaatttctgttttcttgtctctagttaaagaagagtgtaagagtcctaaagctgagtgttggtcccaaaaaatgtccaataagcaggtaagcttccttaaaatcaaatttctagttaccaattttttaatgcaattggtggctctgtagcattggactgaatttctcaaccttttcaaccaaatttataaggtgtgtggccagagggtcactgaagttaagctgacagtcacttggatgggaggttgtacacctaaagtcctggatttggaactagaggcacctgaaatcctgattctctcatttaatagttgggtggccttgagcaattcactttacctctcacagcctcaattttctcatctttaagtggagataaaaatattaatcacttgtccaggcgtggtggctcatgcctgtaatcctagcactttgggaggccaaggtgggcggatcacctgaggtcaggagttcgagaccagccttgccaacatggtaaaaccccgtctctactaaaaatacaaaaaaatcagccaggcgtggtggcatgtgcctgtagtcccagttactcgggaggctgaggcaggagaatcacttgaacccatgaggcaaaggtcgcagtgagctgaaatcgcaccactgcactccagcctgggcaacagtgagactctgtctcaaaaaaaaaaaaaattaatcacttgtagttgctcccaatatatatggtcttgtgtgtgtgtgtgtgtgtgtgtgtgtgtgtgtgtgtgtatacatagacatatatatacacacacatagacattatatatggtcttatatatatacacatagacatatatatatggtcttatatatatacacatagacatatatatggtcttatatatatacatagaaatatatatttacatatacaattgaagtacatggaacaaaatagcaaatttaacaggctaacttctgtggaattagattggtgtgggggaagccaagatcatttatgttttactttatatagtctctgctgtttacaaggattatggatgcattttataatgaaagaataacaaatctttgatctaaaaaaatttgacacgtatatttattagatgtgtacttttctgtatgcctatcatattttaatatatatttttttaaattgatctcttatagtaatatattaaatttataaaaggtcttagctgaatatttggcacataacaggtagtaaatggaacccattaatgtttagataccagtaaacggtttaattacttgacttttaaggccctctccatttgaaactcttatactgtaatttcctttcttctagaaaagggattgataaactttttgttcaatagacatctttggtgaagcccatggacttttggtgaagccattattattctcagaatagtatttttaatgctaaaataaaatacatacgattttaaagaaaaccagttatactgatatacaattagaatcaccactgttgtggttttcatagttgatttgggctgctataataacaataccatagactaggtacatttgaacaataaacatttatttctcacagctctggaatctgagaagtccaagatcaaggcactagcagaataatgtctttaatgctaaaaagatttaagagaaaaccagttatattgaaatacagttagaatccggtaaagtgccattgtctggtgggggctccctttctggcttgcagatgatgcgtcttctcatattctaacaygatggagagaaagagctctattctctttctattcatataaggacactaataccatcatggatgttgcaccctaaagacctcatctaaacttaattacctaccaaaggccccacctcctaatatgatcccattaggagttaggattttaacagaagaattttgggggaatacaaacatgcagaccatataagtgttttgttgcctatattcataattgcaggaaatgctaaatctcattgagaggttaatgaagattaaggtgtaattttccccatccaagtttataggccccttttcttatgatacaaaagggaaaatagcacataaaatttttttgcaacaatttatttagaacactattacatattaactataaatatatttgcacaaaaagtttattcttacttttttaatagactttaraagggcctgccaaatataatattaagctattgaagagaaatgaaagtccagaagtctcagaaacccaaaaggttgtgactggttatccaaatgctattgataaggtaaaaaactatttattccaattctcttcccaaactttaacacctgggaagatgrttgagtgaaaatcgaatgaccatttttgtacataaaactcagctttttgtgtgttcttgtattatacgttcatcttcatgcccaaaatatttattcttttagcctaactctggaattgagaactttttagcatctttgaatatctccaaagaaaatgaagtacagtcatctcatcatggggagcctccaagtgaagagcatttgtcaccacagtcatttgccatggttcgtattttgtaggaactttcttactgtggtaatttctcgactgttgaccatgcagacatatcccatgcaagtgttcaaacacttccatcatggaggctggtatgttacatcattattgtcatcttgtgaggaaaccaggctgccctgggcaatttagccatactttttctctttagaccacagttcccctgcttttcaaacattgctactaggtaactgggatgaaagttaagcaggaggataagtatcgtttctgtatcagaaatgtgggtgttgggtttttttttttcagtttctatctgaatgtagttaatgtcttaattgttaacaatggaattctttccaagaaagatcaataagttctacagatgtaatgttgactttgttctcttcaccctcaccatctccatgtgaatcattttcaaaaagaagggaacacggatgcttaaagaaattctaaaaattgatggctctaacactgtggaccataagaatgaaatcaaacagattgctaatgaaatccctgtttcctctaacagaagagatgaatatggattaccctctcagcctaaacaaaataagaaattaggtaagtaaactaaatactattaccaataatatcattttaaaaattcaattcatttggttctttttaatcrtgtacttttaaagataaaactgcttttattttaatgtatttatttattttagagatggtgtcttgctgtgttggccaggctggtctcaaacttctgacctcaagcaatcctctcacttcagcctcccaaagtgctgggattacaggtatatgccaccacacctggcccaaaactacttttattcttaaaactataatttttatatttgtttcagttatataataatataactggccaggtgtggctcatgcctgtaatctcagaactttgggaagctgaggcaggcggatctcttaagctcaggagttcaagaccagcctgggcaacatggcggaaactctgtctctctaaaaaatacaaaagttagctaggtgtggtggcgtgtgcctgtagtcccagctactggggaggctgacgtggtaggattgcttgagccttggaggcagaggttgcagtgagccaagatcacgccactgcactctaacctgggcaacagagatagaccctgtctcaaaaaacaaaaagaacaataataatacaaccatgtaaccaatagatctacagtcactaaatgtcttcttgtgattacttaattgtagtgttatagataatcattctgtagacatccaaacctttaaaagtttgcacattctagcttttgtcctcagtaatttaaaaattatcatgtaacttaaatacattatttaacttttctgaaatcttgtttcttatttataaaataagaataatacattacagattacttgtggtaattatataacatgtataaatataaaacagcactatgtccaacacattgtaggtgctaataattgatattaatattatgttaaaataacctaactgttgtaaaaatagaaaaatctacaaaatcaattaaaaatcattaatagagttagatataggaaagtgagtcatactcttaagtctgtaaagcctatagcataacatctggcacataactggatttcagtaaatatccgccatatttgttcctaccctgaatgtcctctatactttagcattttatctgtataatgatctactaaaggcagccaggaagaatgactgatacaaaagtggatgtgggcagaagtttctcagagaagtcaaaaacattttggaataagcagatctaagcgtattaaagatcaaaacctggaattggctgggcacgttggcccacatctgtaatgccagcactttgggaggccaaggcgggtggatcacctgaggtcaggagtttgagaccagcctggccaacatggtgaaaccccctttctactaaaaatacaaaaaattagccgggtgtggtggcaggcgccaccaagtagctgtaatcccagctacttcagaggctgaatcaggagaatcgcttgaacccgggaggtggaggttgcagtgagccaagatcacgccatcacactcgagcctgggcaacaagagcgaaactctgtcaaaacaaaaacaaaacctggaataaaagcagaacctaaccccatttatattccagtgataattaattaaaaattccaaaaaatattaggaacctgattatttattatagtgacagacatggtcctgaaatagaaccaaattaattttaagacaaaattagataaagatggtcccattgtcaaaaacaagtaagttttactttatttcagtataggaaaaaaaaaaaaaamaactcataggctttagagtcttagggtcactagctcagaatccagcccctgttatagaactaactggctctgtgactttgagcaagccacttaactgcttttttaatctatattagtaagaagtttggattaattcttcaatgaggtatgcttttgttctattagtgagtttgttaatcataaagaatgtgaacactcagaattttaaaatcatcttccatataaaaacacttagaagacaatttcaaaaaaaacttttaagaaatattatttcagagccacaaaaatattcatccatgtgtctcagaatgtaaggtggaattgcaagaattgaggtggaagccaaaacttcaaaacttaaggatgaattatatttcagctcaagaaagccatttgtttattcattcttttatttttctcttcttacttctgcaaaacaagaaagccatttgtttgttcaaattttacctgtagcagtaccatgtagtcattagctgctcaaggttttaatttttggcagttaggtacttatattttaaaatctttatcttaataatttatcattaatcaattatactcatccaaaaacctttactgaagtcacaataattttaggaagtactaaatagttgtttatatgtgcttcatggaagactcatctttttaatgcagttggtggctctatagcgtctaactgaatttttcaaggttttcgaccaaatttataaggtgcgtggccagaggaccactgaaggtaagctgacagtcacttggatggcaggttgtactgctagagtccaggatttggaactagagccacctgaaatcctgattctgttatttaataatgggtggccttgagcaattcacttcactttttagcagtttcstgcktgctcttctataaaaccctacaataagtgcataatttgagatagtattttattaataaagatagactcttttctcttttttggtagcatcttatatgaacaagcctcacagtgctaatgagtaccataatgttcagtctatggacaatatgtgttggcctgcccccagccagatccctcctgtatccacaccagtaactgaactttctcgaatttgttcccttgttggaatgccacaacctgatttctcctttcttaggatgccacaggtatagtatactactgttctatttatataaattatttaacattaagcttaaataaattggttgaaaatgtttagctagaaaaaataaaatggggcctatttttcttaactttatgagcagcatagatttatgcttcttaccctagctctaatatttatacataaccaaagccctaagagaagctgacagggaggaactgggcagcaggtatcctggcaagattcctcaaactaatagagccagggatcttggcctacagtagcaattttcaaactttttggtctcagaaacttcacactttttttggaggaccccaaagagattttgtttacttatatccatatttactgtgtttgaaattaaaacaaaaaaaattggccagttgtaatgggtcatgcctgtaactcagcactttgggaggccaaggcgggaggacagcttgaggctgggagtttaagaccagcctgggcaacatagcaagacctcatctctacaaaagaatataaaaataaaattagccatgtgtgttgtgagcctgtagtcccagctgctcacaaggctgaggcaggaggacggaagcccaggaggtcaggacttcagtgagccacgattatgccattgcactccagcctgggcaaaagagcaagaccttgtctctgaaacatatatatatatatatatatatatatatatatatatatatatatatatatatatatatatataatattacaagtaaacctatatgtttattaatccattgtttattaaaaataactttcacctaatagacatctgtagaacatttcatccaacagctgtagaatatacattcttttcctcaacaaatggaacattctcaaggataaaccaaatgttaagccacaaaacaagtctcacaaaattcaaaagattaaaattcaatcaagtatattttctgaccataatgaaataaaaccagaaatcaataacaagaggaactttggaaactatacaaataaatggaaattaaacattatgtttctgaatggcccttgggtcaatgaagaaattaagagaaaattttaaattttcctgaagcaaatgaaaatggaaacacaacataccaaaacctgtaggatacggcaaaagtagtactaggagggaagattatagcaataaatccctgcatccaaaaagtacagacacttcaaataaacaacctaacagtgtgtcttgaagaattagttctagcagtcacactactgggtatctatctaaaggaaaagaaattgtataaaaaagatacctgatttgtatgtatattgcagcactagtcacaatagccaagatgtagaatcaacctaagggtccatcaacagatgattggataaagaaaatgtggtgtatatatacacaatggaatattgttcagacattttaaaaaagaatgaaaccatgtcttttgcagcaacatggatggaactgaggccattatcttaagcaaacaactcagaacagataccacatgttctcatttataagtgggagctaaataatgtgtacatagggatatagagtgtgaaataatagagacttggaagggtgggggatgggcagggagtagatggtgagaaattacttaatggctgcaatgtatgcagtgtacataattcaggtgatgaatataagaaaagcccagactttaccactctgcaataaatccatgtaacaaaaytgcactcgcaccccttacgtttatacaaatttttaaaataaataataactagaaaagcaagaggaaaccaaacccaaaattattagaagaaaagaaatgataaagattggggcagaaattaatgaattgatactaaaaatagtacaaaagatggatgaaagaaaaagttgttttttttttttaaaagataagcaaaatcaacaaacctttagccggactgtaaaagagagaatatccatatgaataaaatcagagatgaaaaaggagtcattacatctgataacacagaaattcaaaatattttagagactattatgagcaactatatgcagtaaattggaaaacttagaagaaatggatgaattccgagacacataaaaacataccaagattgaaccatgaagaaatccaaaacttgaatagaacaacattaacaagatggaagcggtagtaaaaagcctcttatcaaagtagaccaggacctggtgttttcgctactgaattctgccaaacgctgaaagaagagctaataagagttctactcagactgttccaaaaacttgaggaggagaaaatacttccaaacttgccagtattaccctgataccaaaaccaaagaaagacactacaaaaaatgagaactacaggccgatatatctgatgaagtagatataaaaatcttcaacacaatactagtgaattgaattcaaaggcacattaaaaagataattcatcatgatcaagtgggattcatcccaggtatgcaaggatgtttaaatatatgcagtcaataactgtgacacatcaacaaaatgaagaacaaaaaccatatgatcatttcaatactaactgaaaaagtgtttgataaaattcagcatctctttgtgataacagctctcaacaaactgggtatagaaggaacatacctcaacataataaacaacaacaaacccacagctagtatcatactgaatgggggaaaaatgaaatactttcctttaaattctggaaacaagacaaggatgcccactttcaccactgttaatatagtactggaaatccttgccagagcaattagacaacagaaataaataaaaggcatccaaaagggaaaggaaggagtcaaactactcttgttagtagacaatataatcttatatttagaaaaaaactattagaattgataaattcagtgaagttgtaggatacaaaatcaacatacaatcagtcacatttctatatactgacagcaaacaatctgaaaaagaaaccaagaaattaatcccctgcagaatagctacaaataaataaaatacctagaaattaatcaagttaaccaaagcagtgaaagatctctacaatgaaaacttattataaaacaatgatgcaagaaattgaagaagacacaaagaaatggaaagattgtccatgttcatgtattggaagaatcaatattgttaaaatgtctataccacccccaagcaatctgcagatacagtgcaactcctctcaaaataccgatgacattcttgacagaaatagaaaaaaaaaaaaaatcctaaaatttatcttgaaccgcacacgatcctgaatagctacggcaatccagagcaaagtgaacaaagctggaggcattatactgcaaagttayataaccaaaacaacatggtactggcttaaaaacagacagagaccaatggaacagaatagagaatccagaaataaatccacacagttacagtcaacttattttttataaagatgacaagaacatatgttagggaaagaacagccccttcagtaaatgatcctgggacaactagatatccatatttaagggaatgaaactaagtgcttatctctcaccattttcaaaaatcaaatcaaaatggattaaagacttaaatgttagatctgtagctattaaactgctggaagtaaacactggggaaacactccagtacattgatttgggcaaagataagtaagacatcaaaagcacaggcaactaaagcaaaaatgcataaacggtatcacatcaagcttaaaaagcttctgcacaacaaaggaaacaatcaacaaagtgaaaagacaatacacagaagaggagaaaatatttgcaaactacccatctgacaagatattaatagccagaatatataaggagctcaaacaataagagaaaaaaaacaaaaaatcccatttgatagtgggcaaatgcaatatacccatgtaacaaacctgcatgtatacccccatgtgtcaaacaaaagttgaatttttaaaaaataaaatataactataaaaatttttaatgggcaaatgatctcagcaaacatttctaaaaagaaaacatacaaatggccaacaggtatatgaaaaaatgctcaacatcactacattagagaaatgcaaatcaaaactacaatgatatatctccaattaaaatggcttttaccaaaaaataaaaaacaggcaataatggatgctggtaaggatgcagagaaagggaaaccctcatacattgttggtggaaacgtaaattagtacagccactatgaaggacatacagcatggaaattgctcaaaaagataaaaatagacctaccatatgatccagcaattccactgctgggtataggtccaaaagaaaaaatatcagtatatgtaagagatatttgtcctctcatgtttattgcagtgctattcacaaaagccaagatacaaaatcaacctaagtgtccatcaatggataaatggatgaagaagatgtgtgtgtatatatatacacacttctcaagatatacacttctcaaaagaagacatttatgcagccaacagacatatgaaaaaatgctcatcatcactggccatcagagaaatgcaaatcaaaaccacaatgagataccatctcacaccagttagaatggtgatcattaaaaagtcaggaaacaacaggtgctggagaggatatggggaaataggaacacttttacactgttgttgggactgtaaactagttcaaccattgtggaagtcagtgtggcatttcctcagggatctagaactagaaataccatttgacccagccatcccttactgggtatatacccaaaggattataaaacatgctgctataaagacacatgcacacctatgtttattgcagcagtattcacaatagcaaagacttggaaccaacccaattgtccaacaacgatagactggattaagaaaatgtggcagatatacaccatggaatactatgcagccataaaaaatgatgagttcatgtcctttgyagggacatggatgaagctggaaaccatcattctcagcaaactatttcaaggacaaaaaaccaaacacaacatgttctcactcataggtgggaattgaacagtgagaacacatggacacaggaaggggaacatcacacgctggggactgttgtgggtggggggaggggggagggatagcattaggagagatacctaatgttaaataaagagttaacgggtgcatcacaccaacatggcacatgtatatatatgtaacaaacctgcacgttgtgcacatgtaccctaaaacttatagtaaaaaaaataaaaataataaaaaaaaaactgaaaaaaaacccaataatatatattttaaaataaccaaaagagtggaattgaaatgttcctaacacagcaaaaatgataaatacttgaggtgatggatatctcagttactstgatttgatcattatacattgtatccttgtatcaaaatatcacatgtaccccataaatgtgtgttataattattatgtattcataaaactagaaacaaaaaaaaaatagtaaaaaatattaactacttaaaaaatttagttagaagagtgatattactcgaattttttttttaaagagatggggtgtcattttgttgcccaggctggcttcaagcagtcctcccaccttggcttcccaaagtgctaggattacaggcacatgccaccatgcccgtcctgctctacattttaaaaatccttctcaccacagtagtaataggagaagctagattctcctgtctgcttaatactgtcaatccctagtgatacgtgtttttttgtagaaatctatgtcctcatacagatacaaaattagaaaaatgaagagaatcttaatagccttttcagatagttttggctatactttaatattacattaaaacttaaaagtgggccgggcatggtatctcacgtctgtaatcccagcactttgggaggccaaggcaggcggatcacttgaggtaaggagttcgagaccagcctggccagtgtggtgaaaccccatctctactaaaaatacaaaaattagccaggtatggtggcgcatgacagagcaaaactccatttaaaaaaaaaaaacaaaaaaaaaaccttaagagtggtattttgtttaaggttagttgcagtgtggaatcttgcagtgtggaatctgaaaccttatcaataaacatttttgtcctccatatacttgtgagaaggtaggaaataagaaaaagtaatgcgaaaaagagcatagcacctcaatataatcatgcgctagatgcggtggctcacacctgtaagcccaacaactcaggaggctgaggcagaaggatcacttgagctcagtagtttgagatcagcctgggcaagacctcatctctttatttttgagacagagtctcgctctgtcacccaggctggagtgcagtgctgtgatctcagctcactgcaacctccgcctcccgggttcaagcgattatcctgcctcagcctcctgagtagctgggattacaggtgcatgccaccacgctcggctaagttatgtatttttaatagagacggggtttcaccatgttggtcaggctggtctcgaactccttacctcgtgatccacctgcctcggcctcccaaagtgctgggattataggtgtgagccaccgtgcctgggctagaactcatctctttaaaaaacaatttttttttgtttgtttgtttggggacagaacctcgctctgttcgcccaggctagagtgcggtggcacgagctcactgcagcttccacctgccaggttcaagcgattctcctgcctcctgagtagctgggactacaggcacatgcaaccccacccggctaatttttgtatttttagtagagacagggttcaccatgttggccaggctagtctcacgctcctgacctcaggtgatctgcctgcctcagcctcccagagtgctaagattacaggcatgagccactgcgcccgaccatcatctctaaaaaaactttaaaaacagctaagcgtggtagtacccacctatattctcagctattcaggaggctgatgtgagaggattgcttaaacctggtagttggctacagtgagccttgatcacaccactgtactccagcctgggcaacagagtgagaccccaactctaaaaaatatatgcatatataattatgaaaatttgatctcagtgcctccctgaaagggtctcgcagaccctcagctatccccagactgcactttgagacctactgaccgcaagaaagttgttttattctctttatatccagttcttgataccctctaacctaaaacagaaagcagttttttctaaaatcagggccaaggcaaagatgcctgctttcaccacttctattcagcacagtaatggaagttctgtccagagcaattaagtaagaaaaataaataaataaaagacatctaaattagaagggaagaagtaaagcagtatccgtttgcagatgatatgatcttatagtagaaaactctaaagattccacaaaaaatcccaactaataaatgcagcaaagttgcagaatacaaaatcaactgacaaaaatcagttgtatttttatacactaacagtgaaaaatctgaaaaggaaattaagaaaactatgatagtatcaaaactatttatagtatcaaaaataataaaatgctaaggaataaaagtaacaaaggaaatgatgtgcttatacaccgaaaactacaaaatgttgctgaaagacatgtaaaaagacaaatagaaacacactctgttcgtggattggaaaacttaatattgttatgatctcagtactacccacagcagtctacaaattcagtgcacctcctatcaaaatcccaatggaatagaacagagagcccaaaaataaacccttgcatacatgttcaaaatattttttgacaagttgtcaagaccattcagttggaagtggatagccgggcgcaatggctcatgcctgtaatcccagcattttcagaggccgaggcaggcggatcgcttgaggtcaggagttcaagaccagcctggccaacatggtgaaaccctgtctctactaaaaatacaaagaattagctggacatgatggcatgcacctgtaatcacagctacttgggagcctgaggcaggagaattgcttgaacctgggaggcagaagttgcagtgagccaagatcacgctactgcattccagcctgggcaacagagaacagagtgagactccatctcaaaaaaaaaaaaaaaaaaaaaaaaaggaagtggatgatctttcagcaaatggtgctgggtaactggatattcacattttaaagaatgaagttagcccttacctaactaacataatatatgaaaattaactcaaaatggatcaaatacctaaatgtaagataaggcctaaaactataaaagtcttagaagaaaacttagggcagaagcttcacaacattggatttggcagtgatttctgggatatgacaccagaagcacaggccacgaaagaaaacatggacaaattgtacttcatggaaattttaacattttgtgcatcaaaagacaataacaagagtgaaaaaggtaactcatagaataagagaaaatacttcctaatgatatatctgataaaaaatatctggaatatatagagaactcatgaaatgagtcttaaatgtaagacctgaaacaataaaaatcctataagaaaccctaggaaaaacttctggacattggcctagacaaagatttatgactaatctcaaaagcaaatgcaacaaaaacaaaaatagacaaatgggactyaactaaactaaaaagctcctgcacagcaaaagaaataatcaacagagtaaacagacaatctacagtatttgcaaactatgtatctgacaaaggactaaatatccagaatctataaggaactcaacaagtaaaaaacagataaccccattaaaaacaggcaaaggtcatgagtgaacatttctcaaaagaagacatctcaaggggttgccaacaaacatgaaagaaatgttcaacattactaattaccagagaagtgcagattttagggccacaatgagataccatctcataccaggcggaatggctattattaaaaaagtcaaaaaacagattttggcaaggatgtagcaaaaagggagtgtttatacactgttggttggaatataaattagtacaacctgtatgaaaacagtatggtggtttctcaaagagctaaaaatagaactatgatttaatccagcaatctcacttctgggtatctaccccaggaaaagaaatcattatataaaaagtatgcctgcatttgtatgtttatcacagcactattcacagtagcaaagatagggaatcaacctaagtgtccatcagtggatgattggataaagaaaatgtgtgtgggtatgtgtgcgtgcgtgtgtgtgtgtgtgtgtgtgtgtrtayacacaccatgtactactatcctatacacacaccatgtaatattatccagccataaaaagaatgaaatcacgtatcttgtagcaacattaatggaactgggggccattatcctaagtgaaataattcagaaacagaaagtcagatatcacatgttctcatttataaatgggaactaaacatggacatacagagtggaataatagacattagagatttcaaaagatgggatggttaagagggatgtgagggatgagaaatgacctactgggtacaatgtatactaatcaggcaatgggtacactaaagtccatacttcaccactatgtagtatatccatgtaactacatttgtactcccaaatctattttttaaaaaaaattaaggtaaaccaaaacaaaacaagcttttttataaaacagaaaattaaagtataatatagttataatttaaatatgagtagaaaacacatcagaatctctgagtcttttatattttggcaattaacttatcttaccaaaatatctcctaagtaaaggatggtataaacatgagtcagcaaattttttctgtgaagagtcagatagtaaatattttaggccttgtgggccagatagtctctatcacagcttccgaactctacagttacagtgtgaaagtagccattagaatggatgtggccatgttccagtaagactttatttacaaaaagaggcagaactccatagtttgtcaactccttgtataaagaaaacagttttgctggctttcatttgcattaggtggattgacccttcagccagcttagaaagctttttattttgtaaacactgaaaaagataaggcaacaactcgaaaatttttgcctggcaattgaaaacttgaactgaaagcccttttttaaattcttgataaaattattttacttgtttagactaaactttgggagaggtcaacttcctagacagagaatttcatagacatatatattctctttttttagacaatgaccgtttgccaagtaaaattatctaatggcttactggtacatgggccacagtgccactctgaaaatgaagccaaagagaaagctgcactttttgctttacaacagttggtaagaactgtccatgacttctctattaaaatttttattmgtccctatagaaagcttgtattgcattgtcttgtaacttttaaatacttccacagggctccttaggcatgaatttccctttgccttcacaagtatttgcaaattatccttcagctgtaccacctggaaccattcctccagcctttcccccacctactggtaagatatttttcatttataagtatttgtcattgagttgttatttttactaagctcttttaagaaatcaagaatgtactcaaatatctaggaatgtaagaagaaattgtgagaaagcctaaagccacagcctgcagattcatctaaaagtaccattctcttcctacagcctctagtatggctagagtagtaagaagaggttgagtgggcaggcccttattctccagtagctgctaacagataaatttgtgtttaagttagacatcaaaaggtaaaaaaaaaatcatgtaatttcttcaggactgtattttcttattggtagtagacatgtccaaaatcttgttgagactaacattttgtaattctaaatcttaagttctgagattttctaaatcactcagctttttttcctaatagcagttggcttccctttatcttaattattattgttttaaagccaataatttatttaagtttagaaaatcccttttctgcatctactgccaggtaatactccaggaattctaaatatctaatgcttacaataagcattagaaaggtgaataatactgattaaatttatgacatgcagttgtctcttctcattaaactgaataataaaggatttcaaaagtgtaaatctgtgaggatgaagacatagaagaaatatcagcagattagagatttgaaaagagtttgtgttgagaaaaacaactgcagaagtaaccattttagcagagcaagtttaaaagctacaagctaaagtgcctgtagaagagactacaaatgagcataagtagattgtccctcgccgttcccaagaggttcagatcttggaggcatcagaaactattagagaagataaagaggaggcatgtgctgaaaagagagggattggttgaaagtctatgtgcraagtggtgagactacccccgtcttccctctgtgacgcagccagacctctgcaagcaaaaaactggaggtgtgttttctagaggagctatctagatatgggaataccaggcagagaagagaatggaatgtgagactgaaaacacagagattaaggaaaagttccctttttctcatcctgttctcagattgtagccagtcatacccttctccccagataggaaattggaagatgaaaaaagaatagagtacaggtaaaattgttaagtaaaattttaaaatttagtagataaagtcctagcaaagccaaggaagataaaagctgtaaaataagaaagaacagagacttagtgcacagatccagctcccaccttattagagttccagaaaaagagatcagagatgaaggaaaggaggtaagtgtcaaaaaaataataaacttttctaaaacaaaacgatatgcatctctaaaagagccaccaaatgttgagcacaatgaataaagacacagattatcttcagattctgaatactagtgataaaaaggtggtcctaagagattcagagaagaaatatgtacaaagatcaaaaattagaatggtactgcactattgaacagtgcctagaagccagaaagcattgaatacctcaaaaccctgaggcagaatgagtttcatcctaatttctctgtatagccaaactgtgaatctaatacaaaggagacacaaagatattttcagatacgcaaatttatttcttatgtacccttttttttttaagcaacaaggtctcactatgttgcccaggctggtctcaaagtcgtggactcaagcagtcctcccacttcagccttcagaaatgctgagattacaagcgtgagccttcatgccttgcctaccctttcttaagaagctactgaattacatgctccaacaaaacaaagcagtagtttaaaagaaaattaggaaaccaaaataacaaattgtagatgtagtatagttatacaatgaatggaaatcccaggatgccagctgctcagtgggtctagaaagtgactagtcccaactagacaggcagagggaagtcttggcagtaaggaaggttattaatagatgagcaatgggaaaacattaaggatgggtatagagaagactaagcagcttttattatatttttcctaaagaattgatatgagcaagactaagcttttaaaaaataattattagcctgggcmacatggcaaaacagcctgggcaacatgataaaaccccatctctaatctacaaaaaatacaaaggtagccagacatggtggcatgcacctatagtcccagctacttgggaggctgaggcgggaggataacttgagcctgggaggtcaaggctgcagtgagctgtgatcgtgccactgcaccccagcctgggtgacagaatgagacctgtctcaaaaaaaaaraaaaaaaaaaagaagataatgactaactcaagtaaaaacaaaaggttttacaagaaaatacataatggatctctttttacaagaaaagaaacattatcagagtacccagcttggctctgcagtgataatatttacatagccacataccacaaatagataacactgtttgtatatttaaacaaatgatgtaatgtacttacattgggagtacagggtaagtagtgaggggtaatgcaaaaaaactaaattttgttctatctgaataggaagtcagtagacctaaaaatgcctaaaattaataagttattaacaagtagcataagcaaataattgaacagtgtggaaatatctaaaacagttaaacctggagtagaacagatgtctgctgttttctgttgaaaatcttttttaggccgggcgcagtggctcacgcttgtaatcccagcagtttgggaggcagaggtgggtggatcacttgaggtcaggagttcgagaccagcctaaccaacatggtgaaaccgtctctactaaaaatacgaaaattckaaaattagctgggtgtgatggcacacacctgtagtcccagctactcaggaggctgaggcaggagaatcgcttgaacccasgaggcagaggttgcagtgagctgaaatcgcgccactacactccagcctgggtgacagagctagactctgtctcaaaaaaaaaaaaagaaaaagaaaatcttttttagtacaatgtatatgtagtattttgattttttttaatgtaatttgtctaaggtcattaagttactatctagcagaactggcatcaaaatccaagtctgagccaggcttgttgactcatgcttgtaatcccagcactttggaaggcctatctcaagaaaacccccaaaggcccaaaccaaaccaaaacaaaacattgtttatatagtcaaaggaatgccagtgcagtacagtaacaaaagcatgggctttgaaaacagatagctgagtgtggtggctcatacctgtaatcccagcactttgagaggctgagctcagaggatcactagagccatgagttcaagaccagcctaggcaacatagggagaccttactgctacaaaagatggaaaaaattagctgagtgtggtgccatgtgcctgtagttccagctattnnnnnnnnnnnnnnnnnnnnnnnnnnnnnnnnnncactgtagcctaggtctcaaaaaaaaaaaaaaaaaaacagacgacagacttggatttttttttttttttttttttttttttttttgaaacaaagtcccactctgtcacccaggctggagtgcagtggcatgatcagggctcactgcagcctcaacctccttgggctcagttgatcctcctacctctgcctcccaagtggctgggactatggcacccaccaccacacctggctaatttttgtatctttttatagagacagggtttcaccatgttgttcaggcttgtctcaaactctgggcttaagggatccgccagcctcggcatcccaaagtgccaggattacaggcatgagccactgtgcccagccaacaatgttttagtcataaagttttcatgacgtaatggatctgatgtttttatatagctcaatgtaatagtatcaccgtaacttataaaatctaatttgactgctgctgcttcacattcaaaaatgaatacagtagctatgtatagattaattttaagtaattagtatgtgtagggtacctaaaagtttgcacacaaacttctctaaagaagaattgtcttatgatcatatattttttaagaggaatgtttgttttccccatttattattgatattttaacctttttcatgttgattagtttattcatacctactaataattttaaggttataattggaatgcttttggtcctataaaggtgttctccaaatattccagttaaaatatgtaaatacataaatgccaagatatttggaggttaatcagcagagaacaacttaagcattagattaacattttaaagttattttgtaaatttctattttatggtataaaaaaatttgtgatgtaaaatgtcccagttgaggaatatgtatttcatatttgtaacagtgatttattggggaaattacggagttgaccattgtataagattagcatagcatcttttaaatagaccttcttagcattatgactcccaccaaagttgctcgtagatagtttcaagacctaattttctacttttcttaggtctcactctgtcaaccaagttaaagtgcagtgacatgatcttggctcactgcaacctccacctcccaggctcaagcaatcctcacacattagcctcctgagtagctgggaccacagccacgtgccatgcctggcatcccaaagtgctgggattacaggcatgagccactgcgcctcgcctaattttctgaatcttattagtgtttttcatattaaaagttttcttcttcttagaatttgtgtatgtgtatttcataacactgaaatatattatgattcttctctcctaayctaaaagtgtcttaaatagctgaactttaattaagctatactgttttacaggtctggctrctttttatctctatgaaaagaatatttgaacatagtgcatatcttcttcagtggcgtgtgctggtgccttgaatgtcactgtttaatgtagttttcaaatgctctactggtacaggctgtctccataagaatcgcctatggagcttaatacaaactccagggcccctcagagtctggcttactaggtctgaggccctgtccaggaatctgtatttcacaaactcctcaagtgattcagatatacaaattagatttggcacccattggttcattacatttttaataaacaaactgtaagtgaaaaaaggccttgacttcaaatattaaaatagagaaaagaaagattctacctgtcatatgaaggtgatgagatttcaggacttgaggttttttggtttttttgtaggctgggatcactatggaagcaactatgcattgggggcaggtgagatccttaagatttctctatttgtgcccaagcttttctctcacaagggacaatttcatgacccttttattttttttataaatataattgcaaatattcctaaaacttgtatcagcatatgatattagtagtagtattctccttttcaggccagtataatgataaattcatttgtgtrgatagtccacacagtcctaggaaaggatcctgaggttgaatgttgtaaggaagagtaattataggtgaagtaagtgtaggccttttgccaaaggggaaaaaaaaagcccaaaaaggctagcagaaggaggtctcaaatttcagagctttgatgataccattttactaaaagaaaaattttccttggtttttaacagctaatataatgccttcgtcgtctcatctctttggctcaatgccatggggaccatcggtgccagttcctgggaagcccttccatcatactttatattctgggaccatgcccatggctgggggaataccagggggtgtgcacaatcagtttatacctctgcaggtaagaaaaataatatttttaagataattatttgtttaatgctgaaagactattgataaacatttttttattcagtttacttattcagtgccaactagaagttcagtactagtgtgggtagtaagaaggcaatggttgacaagtctgacctgtctctgctctctgagtttgtgttctaataaacaataattgtaccaagtaatatgctattctaatacagattgattaaaatcagtaatataaataaaatcacaaatattttcaaaataacctatgaagaattgtatttttattattattattattattcatttttttggagaaggatctcactctgtagcccaggctggaacgcagcccatgcacaatctcgactccctgcagccttgacttcctgggctcaagtgatcctcccatcttagactcccgagtacctgaggctacaggcatgtgccaccatgcctgtctagtttttgtaatttttttgtagagatggggttttgccatggtctcgaaccctaggtctctaccgatccacctgcctcggcctcccaaagtgctgatattacagttgtgagccactgcacacagcccaagaattttaaatattttgtttgtaactaagtcctttgaattactaaagtcttacttggcaattataagtggaagtcacagatcagctgtgattgacaaatattaacagcatgcatggtttatggtaatttccaacactagctaattttttgcctacattattaattagtgatgcttttattcctaacaggttactaaaaaaagggttgcaaacaaaaagaactttgagaataaggaagcccagagttctcaagccactccagttcagactagccagccagattcttccaacattgtcaaagtaagtccacgggagagctcatcagcttctttgaagtcctctccgattgctcaacctgcatcttcttttcaagttgaaactgcctctcaaggccatagtatatctcaccataagtcaacaccaatctcttcttcaagaagaaaatcaagaaaactggctgttaattttggtgtttctaaaccttctgagtaaatttggctcttagaattaagttaatttcttctctttccatctacctttttataaatacatatctatgtctcataaaaattagaatgtactattttaaaataayatgtgtaaattgaaatttttttcatttttaagttatcaggcacttttcatgctgtttaaaagactgtgtatcaaattgtgcactttaagtatgtgcagtttgttgtatgtcaattatacctcaataaatctgtaataaaaaactaaattaaaccttgcattaaaataatatcacagtatcagtggactaaacattaaaatgtaccactctaatcattggcctcatgattgaagcatcctgaactatgaattagacatcagttagcaataataagcattttttacactatcattgaggaataattacatggagcatgaaatttgggcctccagtataacttactgaatgtggattttatttctctttttaatgatgtaagaaaattgtcaggagaatggctcttatttatgtgtgttttaacttatgctttgttgcctctgagggtctttagacctgctgtgaaaggatcacatttgttgtggtgctgccagttttgctttattctaaattttgtaccaaagcaactttagaataatcagaatatttcatctaactgcttagaactataaatagcattctaaatttgagtaaatacaattttttaggttactcaagaaccagcattagtaatttctagtaaaattgtttcaaaatctacagggtacaatgattacaaattaatcttctaacaaaataaaatatgaaatattagtcatgttaattaataaactgtattattttgtatagctttttatttgcttacctgacattttatgagagcttcatagttggtcggtatgtagtgcttcttgggactgaagaaattctaattgttgtttaagttccaaggtgtgctacaatataggaggcacagtcatcagtttgtgacatacattatttactgcctatttcattctgattctatatttttagctttatgctgaactgttcaatgatgctgggattctctctttgcatgtcatatgtgaatgtgtggttcaagctgtaactgttgaaattattttagaatttatgacgatttctcagcagggcctatgtttatatatatatatatatttattctttagtttttgtgatatgcttatatttttaaggaagtaagttatagcatacttttttaaaagtaggaaccacaatctttatatggagcagcttgttatatctgattttcatgtaactcattggaaactctgccatgactcttaaagtagtcttacttgttttttaaaatgctggtattaaactaaatggactcctttcactaactgctgatttcagagtttaaatgttagcaggatatttgtgtattagcagtgccttcagtataagagagaaatattcattatctgtcatttatcatagtcgtataagtttccatgattttattttctgttattttcataagttcagatgtttatcagttcccaacattgtttctttatctgtagtgggatcttgagtaatgaggctcaagtaaatcctcaatgtgtataattattgcctcataaactctctctttgtttttaaaggaaacatctattatggtaatacaaagaaaagttaaattgtgacagtaatgttatattaacctcttcctactttaaagtgtgaaatgtttcacctcagctgtacaaactccagcattgagaatttgcctcactcattactcctgtgtgacagttatataaatagcatgcagctcacatctgttttagagcatagaagaagcggcacctgccatcttctgaaaactccaaagggaaatttcagtagacatagtgcactaaacccataaggatacttgaccaatatttgagcacagcaagctgacagttctatacagataggcagtgaaagagttttattttccagccaggcgcagtggctcaaatcccagcacttcgggaggctaaggcaggcggatcacttgaggtccggagttccagacaagcctggccaacatgatgaagccctgtctctactaaaaatacaaaaattagccgggcgtgatggcacatgcctttagtcccagctactcgggaggctgaggcatgagaatcatttgaacccgcgaggcagagtctgcagtgagccgagattgcaccactgcactccagcctggagagcagagcaagactctgtctcaaaaaaaagaaaaaagttttattatccttactttttttttaacattattattctaaaggtcaaaactgagaagagattaagataggagagagctccataatggctggatagtggtcaggcattctctattcttttccccctgtagacccattctaaatgtgggcctgaggtcaatgggagatgtgccctccctatggaggatgtaagaagcagaggccatttctgccccatgttgaggaaacaatctgttgatagacctggaatttagagtayatctgaaaagcagttggacttcaagaaatttaaaattctctctttgagatggggtggactaagaccacccccaaagtttaaaaatatgctcattcaacttgaatcttctgaggactttttgtgaaaatggtggactgtttagggcataggacagattccccaaattgctttatgcttccacataactagagcacttcaatctatttaagcctttgtctcctaactgaaacattatttctaaatatttctattcaataagttttttcttttttgagcaacttaagtgaattttgaagattgctccttccagtctcgttccttttcacattttcctgcattacctaataattacctcagcgttagaatttgaatgtattaattgatttaaacatcatgtagactaaagtcttaaacatctaagactcagttgtagttgcagaaaaaaattaaagtcacctctactgaaccttggtttcaatttaagatttttcttgcttttcaaaggggtaactaataaagattgaagggtttttttcccgattggtggaggaatgaagaactattgatgcaagtttttttattgtttctttctatgatcaggtacctgctttcattttagactgctacttccaaactaagctagattcttggttttaatgagaggaggcagagagagggaggcagatggaagaagaaaaacagttaaataagacatacccagtcactgcatttttggactataccgtatctttctagcacaaggaaatagataaactgtaaggtcttttttactcactttttatttatgtgttctatttgtgttagtcataactgtttatagtggttgtctaatttttacttttattatatgagatagagctgtgcagatcttcactcaagttagttctgtcacgcttcttcccattatttagagcacagttttttaaagcaactgtacaatttctcagccttatgagcttgctgtatttcttggtatcatgttgcttccaaattttgtttttactgtagaagacaattaatttattgtagagaagtggctgtgaaagtcgttctctgtctttaaaaatcaattgcagaagttcatttgtcatttttctagagataaattatagtactcaaactggcagtgctcagtatatacattttgtaagctttgtcagtgaaaccatcagttttgcaggagcttcctttcctagtcaagataaagcttaaaattccagaaattaatgtcgttcggactgactttattcatatttccatcaaacttctccaatacagtaagagatagtgttgaaccagcatcaagtctccagaaacatggcagagcagacaggccgttaagtttcacagacatcatagatccttttcttaaagaagaaaaacatgtataaaatagttttagtagtccaaaatgtcaactatctgtagctgcttttgtgtgtgtgtcagtgaacaaataataatgccttgctcaatcaatgcattcagccatctcaagtgcaatttgtgaaggagactatggtttccaaaagatacatttttttacaaagttaaacctgtaaaaagtctttttttttttccctccagccgtacaccaactgcacttggttgtttcagcagttggtatactattaaattgtccaggccaaataggtttctgtagctgttttagtaatttgaagccaaattctcatgctgtttctcattaaaaagaatgagaatttggtccatagttagctttaagttctctcttcctttctttcccttacagttaagggtttggtgggggatggggaggttgttttcgttttttggatttttttgtcttttggctttaagtatcatattttcttttgcctgtatccaactgcttctttgagtattttcatctagtttaatgtgagtaatagatgctgtgctgtcattgaagtgttcaacattttgttcatttaaacaaaagtgtaattcatacatatatagatacatatcttaattgatttctcaactattttataagtaactggaatttttcattagatcttatacagagaagtattttattaaaaattcaaaagggaagacttttatgtgctcattttgtaatttttgattttaaatatctttacattgtctgccaattaaagtgttttaaacttgcattggaatggactccgaatgtatttttgtggtgttacgttatccgtagatttctagcatgaagttagcctcacgatgctgtgcaaaggattttaaaatatgagagtcmctgaaagagtttaaacatctgttcatgttaaatgctctatggattttaattaaagacttgagaatgattttataagctgtttgttcttttattactatgctgatatcaaaagtagaaacattagtctttttgtttgtttgtttttgagacagaatcttgctctgtcgcccaggctggagatctcggctccctgcagccttcacctcccaggttcaagcgattctcttgcctcagcctcctgagtacctgggactacaggcacatgccaccatgcctggccaattttttaattttttttatttccataggttattggggaacaggtggtgtttggttacatgaataagttatttagtggtgatttgtgagattttggttcacccatcacctgagcagtatacactgcacacaatttgtagtcttttatcccttggccccttcccacactttccctctgacccccaaaatccattgtgtcattcttatgcgtttgcatcctcatagcttagctcccacttatgagtgagaacatacaatgtttggtttttcattcctgggttacttcacttagaataatagtctccattctcatccaggttgctgcaaatgccactaattcattcctttttatagctgagtagtattccactatacactatgtgtgtgtgtgtgtatgtacatatatgtctgtatgtacatatatgtctgtacatatatgtctgtatgtacatatatgtctgtacatatatgtctgtctgtacacacacaccacagtttatctacttgttgattgatgggcatttggtttggttccactgtttttttgtttgtttgttttttgagatggagtttttgctcttatcgcccaggctggagtacaatggcgtgatctcggctcactgcaacctccgccttccaggttcaagcaattctcctgcgtcagcctccccagtagctgggattacaggcacatgccaccacgcccagctaatttttgtatttttagtagagacagggtttcacaatgttggccaggctggtcttgaactcctgacctcaggtgatccacctgcttcagcctcccaaagtgctgggattacaggcatgagctaccacacccagtctggttccacgtttttgcaattgcgaattgtgatgctataaatatatgttcaagtatctttttcatataatgacttcctttcctctgggtagatacccaatagtgggattgctggatcaaatagtagttctacatttagttctttaaggaatctccacactgttttccatagtggctgtagtagtttacattcccaccaacagtgtagaagtgttccctgttcaccacatccacaccaacatatatcattttttgttctttttttttttaactagggccattcttgcaggagtaaggtggtatcgcattgtagttttaagttacatttccctgattgttagtgatgttgagtattttttcatatctttgttggccatttgtacatcatctttttagaattttctattcgtatccttagcccactttttgatgggattgtttgtttttttcttgctgatttgtttgagtttgttgtagattctggatattagtcctttgtcaattgtatagatagtgaagattttctcccactctgtgggttgcctgtttactctgctgacttccttttgctgtgcaaaagctctttcgtttaattatgtcccagctatttatctttgtttttattgcattttcttttgggttcttggtcatgaaatccttgcctaagccaatgtctagaaggtttttccaatgttatcttctagaatttttatagtttcaggtcttagatttaaattcttgatccatcttgagttgatttttgcataaggtgagagacgaggatccagtttcattctcctacatgtggcttgccaattatcccagcactatttgttgaatagggtgtcctatcaccactttatgtttttgtttgctttattgttgtgggaagtcagggaccccaaacagagggaccggctgaagccatggcagaagaacatggattgtgaagatttcatggacatttattagttccccaatttaatacttttataatttcttatgcctatctttactgcaatctctaaacacaaattgtgaagatttcatggacacttatcacttccccaatcaatacccttgtgatttcctaggcctgtctttaatatcttaatcctgtcagctgaggaggatgtatgtcacctcaggaccctgtgataattgcattaactgcacaaattgtagaacgtgtgtttgaacaatatgaaatctgggcaccttgaaaaaagaacaggataacagcaattgtttagggaataagagagataaccttaaactgaccgccggtgagccaggcggaaaagagccatgtttctcttctttcaaaagcaaatgggagaaatatcgctgaattctttttcttagcaaggaacatccctgagaaagagaatgcacccctgagggtgggtctgtaaatggcccccttgggtgtggccgtcttctatggtcgaaactgtagggatgaaataaacctcagtctcccatagcgctcccaggcttattaggaagaggaaattcccgcctaataaattttggtcagaccgtttgctctcaaaaccctgtctcctgataagatgtgatcaatgacaatggggcccgaaacttcattagcaattttaatttcaccccggtcctgtggtcctgtgatcttgccctgcctccatttgccttgtgatattctattaccttgtgaagtacgtgacctttgtgacccacacgctgtttgtacactccctccccttttgaaagtccctcataaaaacgtgctggttttgtggcttgtggggcatcacggaacctaccgacatgtgatgtctcccctggatgcccagctttaaaatttctcccttttgtactctgtccctttttttctcaacctggccgatgcttagggaaaatagaaaagaacctatgtgactatcagggcaggttccctgatactgtatggaagatcagttggctgcaagtatttgggtttatttctgagttctttgttctgttccattgttctacgtgcctatttttataccagtaccatgctgttttggtgactatggacttataccatagtttgaaatcaggcaatgtgatgcctccagatttgttttttttttgtttttgttttttttagttctatgaagaatgatggtagtattttgatggggattgcgctgaatttgtagattgcttttggcagtatggtcattttcacaataatgattctacccatccatgaacataggatgtgtttccatttgtttgtgtcatctgtgatttctttcagcagtgttttgtagttttccttgtagaggtctttcaactccttggttaggtatactcctaagtattttattttttttgcagctattttgattctcagcttggtcgctgttgttgtgtagaagagcaactgatttgtgtacattaatttcgtatctggaaattttgctgaattcttttatcagttctagcagctttctggaggagtctttgtggttttctaggtaaacaatcatatcatcagcaaacagcgacagtttgatttcctctttaccaatttggatgccctttatttctttctcttgtctgattgctctggctaggaattccagtactatgttaaagggaagttgtgagagttattccaattctcagagggaatactttcaactcttcttttttttttttttttttttgagacagagtcttgctgtcacccaggctggagtgcagtggtacaatcttggctcactgcaacctccacctcccaggctcacgctattctcctgcctcagcctcctgagtacctgagactacaggcatgtgccaccatgtcgagctaatttgtgtgtgtgtgtgtatttttagtagagacagggtttcaccatgttggccaggatgttctcgatctcttgacctcgtgatctgcctaccttggcctcccaaagtgctgggattacaggcgtgagccactgcatccagctgctttcagctttttcccattcagtattattttggctgtgggtttgtcatagatggcttgtattatgttgaggtatgtcccttgtatgccgatttttctgagaattttaatcataaaggatgctggattttgtctaatgctttttctgcatctattgagatgatcatgtgattttttgtttttaattctatttatgtggtatatcacatttattgacttgcatatgttaaaccattcctgcatccctggtatgaaacccacttgatcatggtggattatctttctggatacattgttggatttggttagctagtatttttgcatttatgttcatcagggatattggtctatactgttcttttttggttatgtcctgtccttggtttagggtgatacttgcttcatagaatgatttagggaggattccctctttctctgtcttgtggaatagtgtcagtaggattggtaccaattctcctttgaatgtctggtagaattctgctgtgaatcttgtcccgtacttttttttgttagtaattttattaccatttcaatcttgctgcttgttattggtctgttcagggtatctaattcttcctgatttaagctagatgggttgtaactttccaggaatttatccatctcctctaggttttctagtttatgcatgcaaaagtgttcatagtagcctttgtatttctgtgatgtcagttgtaatatctcccatttcatttctaattgagcttatttgaattttctctcttcttggttaatcttgctaatggtctatcagttttatttatcttttcaaagaaccagctttttgtttcatttatcttgtttttttgtttgtttgtttgtttcaatttaatttagttctgatctgatcttaattatttcccttctcctactgggtttgggtttggtttgttcttgtttctctagttccttgaagtgtgaccttagatggtctgtttgtgctctttcagactttttgatgtaggcatttagggctatgaactttcctcttagcaccgcctttgctgtatcccagaggttttgataagtcatgtcactattgtcgttcagtttgaagaatttttaaatttccatcttgatttcatttttgacccaatgcttattcaggagcaggttttttaatttccatgtatttgcatggttttgaagcttccttttggagtttatttccagttttattccactgtagtctgagagagtgcttgatataattcaattttcttaaatttattgaggcttgttttgtggcctatcatatggtctatcttggataaatttctatgcactgatgaatagaatgaatattctgcatttgttgggtagaaggttctgtaaatatctgttaagtccatttattccagggtataatttaaatccattgtttctttgttgactttcctgtcttgataacctgtctagtgctgtcagtggagtattgaggtcccccactgttactgtgtttctgtctgtctcatttcttagatctagtagtaattgttttataagtttgggagctccagtgttaagtgcatatatatttaggattgtgatattttcctgttggacaaggccttttatcattatataatgtcccgctttgtcttttttaattgctgttgctttaaagtttgttttgtctgatataagagtagctactcctgcttgcttttggtgtccatttgcatggaatgtctttttccacccctttaccttaagtttatgtaagtccttgagtgttaggtgagttttttgaaggcagcagatggttggtgaattcttatccattctgcaattctgcatcttttaagtggagcatttaggccatttgcattcaatgttagtattgagatgtgaggtaccattccatttattgtgctgtttgttgcctatataccttggttttttggttgttgttttttttttattgaattttt

SEQ ID NO: 94257 - DNA, 28178 bp, Homo sapiens
aactcaggtgatccacctgcctcaacctcccaaagtgctgggattacaggtgtgagccaccatgcctggccaagaaaattttcgactccctcactcagcttcatctcccaccactgcccttttattcctacccaaacatatcatgctttaagttaattcagtcacaccaaattacttacagtttccagatacttcaccttgttttgttcattttccagtacgttatcctctatctgaaaaacttttcttcccttctttgcctagcaaaagccttcgcactcagcttagaygtcaactccaccagaaaactttccatagctctctgatttagctgtcctcttctgtcctctcatagcatttcctacaattattttatgttggaatactcataaatagatatgctaggagttttgctttatttatctgcatcttctgctacactgtgggctccctgaaagcaggtcagatgcctcacccaccttcattctatattacctgatatatgaaacgggttgttgttaaatgaatgacttatgaaaggggtgagacagaaggaagagggggaaggaaaagaacagagaggggggaacgaactgacagagtggatagggagacaaacaaaggtagaggtagggggagagagagagagaacatgtacacacacacagggcattaaaaaagggaatttgtaatcaatccattattttttcatgtggcctaagccaatcattgttgaagaaagaaaagtacatctggaaaattcaatctacgtggattctaaatataaccacctttttttttttttttttcctgaaatggggtctccctgtcacccaagctggagtgcagtggtgccatctcgactcactgcaacctccacctcctaggttcaagcgatcctacctcagtctcctgagtagctgggaatacaggcatgcgccaccatgcccagctaatttttttatacttttagtagagacggggttttcatcactttggccaggctggtcttgaactcccaacctcaagtaatccacccacctcagcctcccaaagtactgggattacaagcatgagccaccatgcccgccaaagtataatcatctaaatcattcctcctctaaagattctggtatatccagcccaaccagcccattttaattgaaaatttactgctacgtaataaaagacgttaataacatgtacaatatagatacaggaaaaaaaagtttgagtttaaaaaaagtaaaaatcggccgggcgcagtggctcacgcctgtaatcccagcactttgggaggccgaggcgggcagatcacctgaggtcaggagttcgagaccagcctgaccaatatggagaaaccttgtctctactaaaagcacaaaattagcccggcatgatggtgcatgcctataattccagttactcaggaggctgaggcaggagaactgcttgaacctgggaggcagaggttgcagtgagccgagatcgcaccactgcactccggcctgggcaacaagagcaaaagtctgtcttaaaaaaaaaaagtaaaaatcaacctgacataataaaaataagtcttggaattatttacaaactttaataatctaccacctccttataatgtggtactgctgatttttattttattttatttagtttttttttttttgagagagagagtttcacttttttcgccgaggctggagttcagtggcgcaacctcagctcactgcaacctccgcctcctgggttcaagcagttctcctgcctcagccttccgaatagctgggattacaggtgtgtgccaccatgcccagctaattttgtatttttagaagagacagggttttactacgctggccaggctggtctcaaactcccttgacctcaggtgatcctcctacctcggcctcccaaagtgctgtgattacaggcgtgagccaccatgcccagccggcaccactgatttttaaaagtctatcaagagcatgaaaaataaattcaacataacaccaacatcacgatctatgttacagcacaaattccttatgtattacgaatcatattcctcaaaaacatactgtgaaaaaagtaacatagcatatattagacagtaatgggaatgtatttgtttacataaattcttaaaggtagtacatgggaaaactgctaaaacatacaacacttcaactttaaaacaacacctaaaaagtattactacataatctaactttcaatcacctcaataaactgtcacttaataaaatttaaagatttgttgtcgttaatacaacagacaattcaaacttaaaagcttgctcccaagtacaaatatgtttggtaagatccaataaatggcataaaaccttctgtagctcaatgatcatcgtaatacagaaattacaccaggcacggtgactctcgcctgtaatcccagcactttgggaggctaaggcgggagagtcacctgagcccagaagttcgagaccagcctgggcaacacggcaaaacctcatctctacaaaaactacaaaaattagccaggtgtgcctgtagtcccagctactcaggaggctgaggtgggaggattatttgagcccaggaggcagcagttacagatcgtgccagccagggtgaaatagtgagactctatatcaaaaagaaaaataaaaaagaacgaaagaaattgggaacacacagaaaaagaaacaaaatttaggcctaatacactcaacattaaatagattctgaattgcaatttttgctaaagcaaaatacaaattacaagaagcttctcatcttttatcacataagaaataaagttgtaagaaataagctaagtttttagtactaataattactagcaaattctctgagatttgctatacttataataacaggaagtacttgtatgaagttagaaatttattttagtaactttttccttttaacgttaaaagcacctttttaaaaaatgcagtagaatgtaatgctgagcacttaaaattagtatttctaaaaagataccaaaaaatttgcatttggctagtattaccaagaaacttttaaggctaaagtttccaacatactttcatttttttaaacagactacttaaaaaaaaaaaggaaacgaaaggaagaaaaaaaacattttaatctcagactttcaacttaactacatttcttttaaccaaacatttatagagcacctaagaagtgacaagcactacaacactgggaaatgtgacacattacatttactccaaactaaaccttttatttattcggcttctgaacttattatttcttactcaaaccaaaacttttcttaagaaattctcacccaacatcaaggtacatatacgagttacctaataaatgcactttcaccactgttttacacaggtgatgagagttatagctaggatttgtgactaacaaaagggattcattcctgaaacatgtctatgcttcatgaaatgagataggaataaactgtttcaggtagtttacagcatcccaaactcaaagagaaaaccttaaaaaaattagactaaacttaattactctgtatagtagaccaagatttaagtagccacagcttttaccttctacaaacacaagtattacaaattttaatttggatgcaaaattgtcaaagcagtcttgattctgaggacaagtgaaatatttttttaaatagttcaaaggaactgtcaaaagtagacaacgttgatattctaacatgctatctgttgcatttctacacttgtgaacactctacccttttcaagcacttctgaatttgtaatggatgaaaaaatacaagctagtgtctaagttccaccagttgaatccagacttttcaaaaatctaaggttttattctagcatgtgtttaaaaaaaaaaaagacagcattcatatacatattctctcaagtaacaaaaatacctgtatttttatcgttatcatttcttccaacaattaagcaaattttttgaccctattctccactcagttaacatattgacatctaagaggaacctggccatcagttttccacacatcataatgcaacagagcctctgacttatttacagaccaaccagatcaataaagaaaaataaaccatataaccccaagtcactggaaatacaagaaacaactggtatctctgaattgtgtaaaaaatcacaaaaattctctttttaaatctttcaattaaattatttttgtgacgagtcaaagagttttctgctaaaattttacagtactgttcacacaataaataagattctctttcatcagtgtaactgatagaaccacaatacagttcagtttctagggtcagattacctgacttgctttttattttaccttttaaaacactttaattcatgccgttattcctctcattccctacaaaaagagatgttcaatatgggagaatcatcttcagttgagacatcctataactgcctccaactccacagcaaagcccgccagctgaccccggtctctctggggaagggctcggtcaccaagtcaccaaacacaccttcctctgcaaaactcggaagccccacacgacgacctcgtcgaaacctcctacttcctgaattcgataaccccagagattcgttttccgcaggcaatcttaccttcatgatgactctgggaccaaggtatcctctaaaacaccaggttcagctgcacctggaggggaaacaaaagacacccagtcamcaccacaggagcccctctgcactggcggaggcggagggaaagaagcgagcgacgtccgaaccccgaagaaagagccgcaccaggcgccagcccccgaaccatcacacgccgactcggggctccctccggccccgccatccccgcaaacccaaccacctacacagctcggcagcttcccgtccccattgtcgagacccgacggagtttcccgtctacgacaatgacgccatttctgtcagagaagaaactcacaacaagcccggcgtccggcgcagggccggccgctctcccctagggcctcggcgcccggccgagcgaatccgcgcccccacgcgccgcgtccgagcgagaggccggccgggggccaccgaggggccaggagggcctgtgggccgcgggcaggaccggcccgccacagagcccctgcccacgtcccgttccgggctcagacccgacaagtgggagcgagatcaacatctggccccgccgcggggacaacgtgagggccgagggccccggaggcggaacggcccccaccctgcccgggcccccgaccgcggccgctaaaccgctgagtgtgcggccgcccagccagggggcggctcggacacagcggctgcggggggtgggggttcccgggaggccgaggccccgaattcgggcgccgcagggaccaccaccgcgatcttcctctgctccttggccgggcccagcgactcccaaaagaacccccttaggagaccacgaaagccccagaaaatatccctaccttcctcggaggcgagatctgaccctggcacgtccagagtcccctctctccttctcccccccaaaaccagcaggcccgggggagagatggggaagaagggcggcgggtccagcggctgctgaggcagaggctccggctcctcctcctcccgcggcggcgactggtacctttgtttggcggccgctcgggctccctggttggggggagggggacgacgaaaaatcccccccggactggaggtccgggcccccaatcgcgctgccctccagaggacggcggcgatggaccctctgcagctccctccgggcaaaggtccaggcggtggccgtggcggcggcaagatgaagctcaagagtctccctccgcttcggcgaccgagctcctcactccggactcgactgacgggcaaacatcgcttcccccccaccgactctaggttccccccctttctcccctcccctagattttttttccccccctcccctacctctttcccggatggcctcttagacgaccttggattggttaaagttctttagaacccgcctatacactgttcctattggtccctggatacaaacaacgacgccattttcccaccagttctatggaaacagaaagttacgcctcaaggctttctgggaaataaagtccatactctggggccaacgcgcaaatcctcgtccgcgagaactgcaaggcccgcaatgccctgcgcctgcgtggaccggtgcgggggcgggggggaggtgaaaggggcggggcaacaaagcagtagggaggcggcaacgacgcctgcgcagtgtgaccgggatggcgcattttcttgcaccaactaatgcggtgtcgctggcggctgaggagggcggagagttctgtggtgaaatagtgggaaggattcatgtaggcatcgggaagagcctaagtccacattataaaataggaagttgatgcggggtacagttactcccggaccggcggcgtgaaagtcgtgatatcatcgttgaactgtgagcggcagtggcggcggctggggggaacccggatgggaagaagggcgggggaggctgggaggcggggcagaggaaagaaagaaaggagagtgaggacccggatgctgaaccggattgtgtatgaattttccatcccctagctttaagcgaggagggagaggaagggttggccaagtggggcggaagggagcatctgagcgaggaggaagcagaaacctcaccgtttcttcccctccggactctgtgctagcactgtatacgtttgcagttctctgcccagccgctgtggaaaatcggcctcgaagtgattgaaattccctgtttatatcaggcggcttctttcagatccatcgtctttctcccggagtatgaatggaaggattcagtatgcgcttcacatttgtatgtctctggccattctcaaaccaggcccttccctttgaaaagtcktttgcatgggatgttcacttcttagacgcaaggttgtgtgccctggtttcatcgtctaacgcgttagaaggcgctttcatttcttcatgggtgttgagcgccgaccactggggtggcctctgccttcgtagacctgcgcctggtgagacggacagatgctgaacaaaacgatgtgaaattaccgcagtggcagtgccccagaggagagttccacggtgataggagaatgagggaatttggcttctttagggagggaaaggaagggtttctgagcaagtgaggatcgagctgagagctgaagggctagcaggagttaactaaggaaagagaaaaggaaaagacattccagacaaaaagactaacttgtcagaaagccctgtggcggaagggagcttttccaatatgaagaactgagcctggagagaggggatgagggggagtgtcgaaccttttaggctttgtaaaggagttttggttttctcctaatagcaatgggatatcttccaaggaatctcaatcaaaagggagagatggctccgattggaatgtcatccctggctgaagagtagaggaagcgaaaaaaagaagagttaaagaggcaaatgcagggaacccgacgaggaggctattgccgtagtagttcacatggtgaaaagaatggagcgtttgtattaatgattatggattcactctttgaacaaatttctggcagctttttagttttgaaagtgagaagtttcagactctcactgaggtattctgtagttttttcactctaaaaggaaactagtagagttcatgtaacacacactaatgcctctttacatttaactttagtatgtgatagctgaaatttccagctgtgataaattgggaaatcctttgatttaaaagaaaaacaaaggcgggtgagggtgagagtatatgccacggtgtgtagaatcctttagactcttaagaagacacaaggcggctgggcgtggtggctcacgcttgtaatcccagcactttgggaggccgaggcgggcggatcacgaggtcaggagatcgagaccatcctggctaacacggtgaaagcccgtctctactaaaaatacaaaaaaattagccgggcaaggtggcgggcgcctgtagtcccagctactcgggaggctgaggcaggagaatggcgtgaacccgggaggcggagtttgcagtgagacgagatcacgccactgcactccagcctgggcgacagagtgagacgctgtttcagaaraaagacacaaggcaagttggttgtcgatacctggaaaaattgaagttcttatgttttcataccactgaaaatgcttgtatgtaaatatcctctgggacaggaaattgacttaagtgagtattcttaaacatctctaagtgaggaaaggaaatattttttaaagcataattagtgttttaagttgaaaaataacatcaaccacaaagctctacgaattgaaacaaagattagctctgatttctgtgcaacagggtacacctgttacaggtcctgacacaaaagggaattctgaaagtgcatctcattgatttttaagttcggtcaaatgtgttttggaggctgtgagaaaatatacaaacgtgattcttgctcccaacttgtagttgagaaaagatagatactaacatttaaatagagaagtatatgagatscttttttaattctacttttaatgatgttcgataataatcttttagctaagccattattcttcctgttttgcatcttcttttcttacttcaatccctgataataaggtcacgtgtcagagatcaaatagtataggtaataggttacctaaataggtatttgcataataggttacctaactaaataggtttttgcctaataggtatgttgattatttcgcttacttgattctttatgagcctttttttccttgcgacgtctttggtattaattgttagtcaagatggatgtagaaattttccatatgggatgtttctctttgaattcatgttgttaaaatgatttcttttggtggagtgctgatcttttttatgattgtttcatatagataagaacagactacaaaaaaatatgcctttcaatcctgaagagtaacctgaactatacactagttttgtgctttaattttcatttgtaatctgccttcaataaagagttaagctagtggaatttatgtcttagcttgttataacacaaacacgaatatttgtctgcttggcattaaagggtaaagatattccatagctgggaatcttaatctgaggtacgtgtaaacattcagggactatatgatctctgagaatttgtatgttgtaagtctttgtggcagtgtatacatttgtgttgcaacttattaacacatacaccgggcttttttttttttttttagaagattcrtagctttcatcatattctcaaaaggtttctgtgacccatgagatggtttacagtatggggaagcatcaaagcacttgcacagttgatggttatatgtgtgtgttattatttcagccacccattatcatgtgcttaccaactgcctaacagtgcatacatatgtagaagttttattcttttctcctgttgccatattatacgtctcatttcacagcagaaaaacaactgcatgacagagacaatgtggttcaaaccattttacccttgtattcattgactgctacaaaacaggaacattaaatacctgattgtcaccaaattgggtagtctcagcacttctacactcgtaattgtgctggaaaagtggaatgctagcactaataattagattttggtttggagggttttttatttgtttattcttacttgtataaatttatggggtgcaagtgtagttttatcacatgcatagattgcattgtagtgaagtcaggacttttagggtgtccatcacccatgtaatcacgttgtacccattaagtaatctttcatcatccacctccttcccaccttctcaccctttggaatctccattgtctatcattccacactccatgtccatgtatacacattatctagctcccatttataattgagaagatgtactatttgtcttttatgtctgacttgttacacttaaggtaagggctatccatccattttgctgcaaatgacatgatttcattttgttttaatggctgagtaatcattcgttgtatatataccacattttctttattcagtcatctgctgatggacacttaggttgattccatatctttactattgtgaatagtgctgtaataaacacatagtgcaagattttggaaattttacttttgtggcacgttgttggtatttactcaggatctttggatttgcttggctgcatgtatatgaatcagtgtgtttatttactgaaatatgtgcaaaagtcttgtctttggtggattaatttataatataaatccacaaaagtcagattctgctcctaagtatattttacatttttaaatttaatgccagcaagaagttacagtactagaattgccttacccctgagagtatcaatgatcagatcatagtatcaggtgactgggctatagaagatgacttttattacttaacattatgaagttactagggctgatttagaaatcgaggaacactggtgaaaccccgtctctactaaaatacaaaaattagctgggcgtggtggtgggcacctgtagtcccagctactcagaaggctgagtcaggagaattgcttgagcccaggaggcagaggttgcagtgagccgagatcgtgccactgcactccagcctgggcgacagagtgagactccgtctcaaaaaaaaaaaaaaaaaaaaaaaggaacacatcctcactgttacaataaataacagtagcccacacccccttagttgtgatgtggtgtgataccatgtaagcaacctatttccagttcccctaacattctcaagcagctgtatcagaatcatacaagatgcatatttaaattgaagatttctaagtctctggcccagacttagaaaaaaaggatcaggccgggcacagtagctaacacctgcaattccaacactttgggaggctgaggcgggtggatcgcctgaggtcaggagttttgagaccagcctggccaacatagtgaaaccccatctctactaaaaattcaaaaaattagctgggcgtggtggcaagaacctgtaatccctgctattcgggaggctgaggcaggggaatcacttgaacccgggaggtggaggttgcagtgagccaagattgcgccactgcactccagcctgggcaacgagcaaaactccgtctcaaaaaaaaaaaacaaaaggacctttgagcaatcagaataacacaaagtacatgaactgaacttcattttcttcattcaaaagaaagtggccctcactcaagcaaatatattcttgtgctttatcttctggcatactgagataactttctaaagtggtttccaattccaaaatccaatgatgtgcaactcattgaacagccctaaccacaaactgccattagatgccatattacatttagcctttttgttgtagaaaagttggttagaagtgggctcaggattctaaagactaaatcatagtcccaagaagcaaaagaaagaggataaaagtaataaacttcccaaaatgtgccaaagatgctagagcagttagattcctaatatgaggacaagtaataatagaaacagatacaaagaaataaagtagagattcaacagtacagggagaccctaggaagaccatgagtgttattctaggaaatactgaaataagacagatttcagtataaaggggaatatgtttaataaatatatgcatttgagttaatgcgtattttaaatcagaaatctctgaaatggattgattgtagagaaactactagggggacgaggagaatccctttaaattttaaatacataaaacatactcatcttagtgctcatttaaaaaaggatatgtttactaattagtgtaatcagttaaatacagaggtatctttccaattctttggatgtgttttgacatttgccgtcaacaaattaagccttttgtggttgattaaaataggaaaagcttaatataagttatgtgactaagaaaacaacttaaaaaccaagacaacactttgaccaatataatcacttgaatgaagaattttctaattgagatataatttacataccacccatttaaagtgtacayttcagcagtttttagtgtattcacagggctgtgcaaccatcacaatttaattttataacattttgatccctgcgaaaagaaaccctgtactcattagcaattagtccctgttcctaaccactaatctactttctttctctgtagattggcttattctgaacatttcgtataaatggaatcatacaatatgtagtctcttgagattggcttctttcacttaacatgttttcaaggcttcatagctgtagaatcttkctttgtttttttgagactggagtcactctttcgcccaggctggagtgcagtggtgtgatctcagctcactgcaacctctgcctcccgggttcaagcagttctcctgcctcagcctcccaagtagccagaactacaggcacacaccaccatgctcggctaatctttgtagttttagtagagatggtgtgaaggctggtctcgaactcctgacctcatgatctacccacctcagctaatttttcatatttttagtagagacaaggttttgccatgttgcccaggctggtctcgaactcctgggcttaagctatccgcccgcctcagcctcccaaagtgctgggattacaggcgtgaactaccgtgcccagcaacagaatcttctttttaaaccagactaggtgtcttttcacaaacaccctgcaatacaaattcctttgcagtttgacactgaaagatgattagtttcatgkgatctttatgtttctcctttttgacagattagctttgaagtttaaatccaatggagaagactcaagaaacagtccaaagaattcttctagaaccctataaatacttacttcagttaccaggtaatacttcacttacagtccatatagggtcattttcatgcagtagtggtcgttcaaatgttagcaaatagaaaaggttagacttgctagccgttgagattttctatttaaggtgatgcgtatgagaaaaatgataaatagaacattataattttttctttattaaaaggtaatttttgccaggtgcagtgatacatacctgttgtcccacctacttgggaggctgaggcaggaggatggcttgagcccaggagtttaaggctatagtgcacaatgatcacacctgtgaatagccactacactccagcttgggcaacatagtgagaccccgtctcttaaaaagaaacgtaatttttgaaggcaccctttaaaacatatccaattatttaacatatcttgaaaaataaaaatacttaaaacattttggtatctcattggaggttgtactctttacggatattacgcattcagattccccactgtttagatattaggggaagttacgcagatttgtttaacagtagaacactttatttaccatacatgttcaagtttaccttctatgtctgtattttccagtatctcacacatacactgcatttcatatactactagttcctttgagagccaaataataatgtatctaaaatcacagtatttggaaatatagcccactttattcctgtataagggtatgccaccttggacatggcttcctacctcacgtgtacgtgtgtgtttttgttttattttgcttctttaaaaacttgtctggaggctgggcgtggtggctcacgcctgtaatcccagcactttttgaggccaaggcgggcggatcatgaggtcaagaggttgagaccagcctggccaacatggtaaaaccccgtctctactaaaaacacaaaagttagctgggcatggtggcgcatgcctgtagtcccagctactcgggaggctgaggcaggagaatcacctgaacctggaaggcagaggttgcagtgagctgagattgcatcactgcactccagcctggcaacagaatgagactccgactcaaaaaaaagaagaacttgtctggaaatgataataagcaaaaactcatgaatataataaacaggggttattgtaataaaaaatcatttgtattagaatattctttctcatagacataatataggccaggtgtggtggcccacacctgtattcccagcactttgggaagccaaggcaggattgcttgagaccaaaagtttgagaccaccttgggcaacataacaagtccccctctctgttttaaacattttttaaaaaagaagaaataatataaaagttggtaaattatttgacaagcataaaaacctatttagccatactgtgactaaactctaatgatgctctcaattcagtctcaatagacacttttaaatttccgtgctaaagtacacacctttctttatgagcacttctctgtggtaatatgtgcatttctgttcttcatgagcctgggaaggataaaagccaaaagaatgcttgctcctgtgctacaccttggaaaccataattagtgtcatttttattttggccgaccctaatagagactcgcctgctaatgtcaatgcatgagaagaatgagggaatgacagaaatggagaattcaaagggaaggttgcccactgtttaagaaaaagccaagagactgcttttgagtgacatttatccagcagttagtaacttatttcagtatctcccagtgagaaacatggcacagtttcactttcactctacccagctcttactgccagacatcctttagaacacgctcacaaacactagctggaactgggctggcattaatagcaagccagttatcagtgctgacaaaagtctaacaagcatcgcttgaatgtctcttactctgctacttaacaaagcaaggactgcctacagttacattttaaccataatgcttacttatgctgtgaccaccttctgtgacttcyttttttttaattctcattacttggaaataatgttttaagacattagataacatatttaaaattatcactaggtacctcacctttttattcaagtacgttcttgatccatgatggaatacaacctcaaaagatactactaaagaaatatgacattgcactatgcacataacacacttatttttttacagagagcttcagagttactaaagtaacttagaggtgtgccaggtcatttatactgttgtaatattactcttgctaataaataataataatgctatcagtattttctgaagtcaacctggccaacatggtgaaaccctgtatctactaaaaatacaaatattagccaagtatggtagcgcatgcctgtagtcccagctgaggcacgggagtcacaggagcctaggaggcagaggttgcagtgagccgagatcacgccactgcactccagcctgggcaacagagtgagacactgtctcaaaaaaaaaaaaggattttctgaaattagtaaagaaaattatttttatttttaaatttctcatacttgctgtcatcttatgtttatgtttgtttatttgccttagtgtggggccctagatgaggtgaagggtgggattagggagagatgaagctggcagtggaggaagaagggctccaaaaagagagacaataatgtttagatcttaaagaggaagcagtaatcttttaattttgagagatctctgtgattagcctcagtactagaaattattttggaactcagccaggcgcggtggctcacatctgtactcccagcactttgggagaccgaagtgggcagatggcttaagcccaggagttcaagaccagcctgggcaacatggcaaaaccctgtctctactaaaaatacaaaaaattagccaggcatgtgatacgcccttgtagtcccagcttacctgggggactgaggtgggatgattaccggagcctgggaggttgaggctgcagtaagccaagatcacaccactgcaccccagcctgggtgattaagggagaccccgtctcagaaaaaaaaaagggggggaaacttaaaagcatcaggctaaacactagcatgtcatcagaggggaaaaaaatattaaaactgtagtacctcaaaaataagccatatattgtactgttttctatataacattcaaaagtaaaatgaaaaatgaaatttcacattgagactctgtttttcatcttcaaaaaaatgtgtttaagtgatacaggccaagtgcagtggctgacttattatcccagcactttgggaggccaagtgggacagattgcttttgagcccaggggtttgagaccagcctgggcaacagggcgaaaccctgcctctacaaaaaataaataaataaaaataaaattagccaggcatggtggcttgttcttgtagtcccagctactcaggggacttgagcctaggaggtcaaggctgcagtaggccgtgattgtgccactgcactccagcctgggtgacagagcgagaccctgtctcaaaaataataataataggccgggcgtggtgggtcacacctgtaatcccagcacttcgagaggccaaagcatgtggacgacttgaggtcaggagttcgagaccagcctggccaacatggggaaaccctgtctctattaaaagtacaaaaaattggccgggcgcggtagctcacgcatgtaatccctacactttgggaggctgaggtgggtggatcacctgaggtcaggaattcaagaccagcctggccaacatgatgaaaccgtctctactaaaaatacaaaaaattagctggatttagtggcgcacgactgtaatcccagctactcaggaggctgaggcaggagaatcgcttgaacctaggaggtggaggttgcagtgagccaagatcgtgacactgtaccccagcctgggcaacaagagcaaaactcgatctcagaaaaaaaatacaaaaaattagctaggcgtagtgacgcacacctgtaatcccagctactcgggaggctgagacaggagaatcccttgaacccaggaggcgaaggttgtggtgagccgagccaagatcgtgccattgctttccagcctaggtgacagagcaaaacttcatctccacaaacaaacaaacaaacaaaaaaacccataatcccagcattttgggaggccaacacaggtgaattacctgaggtcaggagtttgacaccagcctggccaacatagtgaaaccctgtctctactaaaawtacaaaaattagccaggtgtggtggcaggtgcctgtaatcccagctacttgggaggctgaggcaggagaatcgcttgaacccagggggcggaggttgcagtgagccgagatcacaccattgcactctagcctgggtgacaagagcgaaattccatctccaaaaaaaaaaaaaagaaaacagtattttagttttaactttttatgtaaccattttcctgaaaccttatctaaaattaggatgttattaccatgcattcatttagcagaaaacttatagaacatttttactaagtgaactggccatggtttttatctatcattcctttgtatrtgactacartgacttctagtggtaacttctatccaaagacctatcttaaattagccasgcatggtggcacatgcgtgtaatcccagctactcaggaggctgaggcaggagaatagcttgatcttgggaggcggaggttgcaagtgagccgagatcacgccgctgcaatccagcctgggcaacagaatgagactccgtctcaaaaacaaaaaacaaaaagacctatcttgagctttccgtgtaagaaaaagatgatactgttgggtgargtgactcaacgtctgtaatttcagcaatttgggaggctgtagcggccggattgcttgagcccaggagtttgagaccagcttgggcaacatgggaasacactgtctctacaaaaacaaaaattaaccgggcgtggtcgcttgcacctatagtgccagctactcgggaggctgaggtggaggctgcagtgagctgtgaacacaccactgcactccagcctgggtgacagagtgagaccctgtctcaaaaaaaaaagcaagaagcgcagtggctcacgcctgtaatcccagcactttgggaggccraggcgggcggatcacgaggtcaggagatcgagaccatcctggctaacacggtgaaaccccgtctctactaaaaatacaaaaaatgagccgggcgtggtagcgggcgcctgtagtcccagctactcgggaggctgaggcaggagaatggcgtgaacccgggaggcggagcttgcagtgagccgagatcgcgccactgcactccagcctgggcgacagagcgagactccgtctcaaaaaaaaaaaaaaaaaaaaaaacaagaaagaaaaaaagaagatactgaaaaatagatgtccctagtcaaaataatgagattagcttttgactaaactcaggatattaaaagggaatacttcagtgcatgatgatctcatttttgaaaggaaagaagcagagcttccccatctctaaaaccttaattcaaaggagaaatagataatttcaagaggtatttttatgaggtaatagtaaaatatattttattaacagtacctatagttatgtaaaataggtagtgccaattaactgacactaaactagcttcttggcctggcgcagtggctcacgcctgtaatccaaacactttgggaggccgatgcgggtgtatcgcttgggctcaggaattcaaggccagcctgggcaacatattaaaaccccctttctataaaatatacaaaaattagccaggcatggtgtgtgcctgtagtcccagatactcaggaggctgaggcacgagaatcatgtgaacccaggaggtggagtttgcagtgagccgagatcacgccactgcactccagcctgggcaacagagcaaaactctgtctcaaataattaataaataaactagcttccttttcaaaaaaagaaataaattaggtcctaagtcctaaaagcccatcctactttaaaattgtttattcaagttcagatgaaaagagtggactagtaggcaactgaagtgctttagagtctcccgtgcctgccctaattytagaaggttgtgcactttatgatccagatttctgagtggttgagaatgagttattgagcagtgcaaggcaagctctgcagtaggtaatggattgatgaggctggatttagcaagtctgatcaatctaaaggaagtttctgaatgtgttttttgtagttaaaatactcataattaaaacacttaycacattgtcacattttatttttaaattgcaggtaaacaagtgagaaccaaactttcacaggcatttaatcattggctgaaagttccagaggacaagctacaggtattaggcaactctaacctcattaatccccaagaaattaatagctgtcgcataaaaatattcctagttcttgattgaatttagtcctcatgcaagatattattttatattgaggttgctaaatatttattagttgtgaaaattaacacacctgagactttcrtaatctgttaattaaactgagtaagttttgaatagttcaaataagtgaaattttcaattttttttattagattattattgaagtgacagaaatgttgcataatgccagtttactcatcgatgayattgaagacaactcaaaactccgacgtggctttccagtggcccacagcatctatggaatcccatctgtcatcaattctgccaattacgtgtatttccttggcttggagaaagtcttaacccttgatcacccagatgcrgtgaagctttttacccgccagcttttggaactccatcagggacaaggcctagatatttactggagggataattacacttgtcccactgaagaagaatataaagctatggtgctgcagaaaacaggtggactgtttggattagcagtaggtctcatgcagttgttctctgattacaaagaagatttaaaaccgctacttaatacacttgggctctttttccaaattagggatgattatgctaatctacactccaaagaatatagtgaaaacaaaagtttttgtgaagatctgacagagggaaagttctcatttcctactattcatgctatttggtcaaggcctgaaagcacccaggtgcagaatatcttgcgccagagaacagaaaacatagatataaaaaaatactgtgtacattatcttgaggatgtaggttcttttgaatacactcgtaatacccttaaagagcttgaagctaaagcctataaacagattgatgcacgtggtgggaaccctgagctagtagccttagtaaaacacttaagtaagatgttcaaagaagaaaatgaataatgttaagccattcttgattggacctcatagcttattttagttaatcttttttttgtcttttagccttaccaccttttaaaaaatttgttattctccagaaacagtaaataggtgagtaggggtggtgcaagtgaattcgttttcatttagaagcccctctgtacagataatcaaaattcaaagttgaaagaatcaaaagcagccacagttatgtaggtctgatttgaatgtcataattgcagtgacaggacattgccmccaactctatcctactaccatcaatgttgtgtttattccgtcaataaaaaagacttgcttccaggaatttttatccatacactttctaactgtactatctgggcagttccaagccagtttctattagctagctggaccaaagaccacaaatctctttttttcctraacgctgctgtaaggaatatctcacttttccccccggaaacaccctcactgaagtcttctatgaaaaggctgataatgggctgggcgcggtggctcacgcctgtaatcccagcactttgggaggccgaggcgggcagatcacgaggtcaggagatcgagaccatcctgacacggtgaaaccctgtctctactaaaaatacaaaaaattagctgggcgtggtggtgggcgcctgtagtcccagctactcgggaggctgaggcaggagaatggtgtgaacccaggaggcggagcttgcagtgagccgagatagtgcctctgcactccagcctgggtgacagagcragactccgtctcaaaaaaaaagggctgataatgataaacagtgagcactccggtcctttttcttasgttttccttttttccttcctctccaccccacaagttttgctttttaaccaaggtgtctctgcttgatgaaattcacatgctagtctaaatctttttttctcccttgtaacatttatgtgccccaaactggttagtatatgggtacagcattccctttccaattgggaagcggaaaaagagagtatgggatattttagaagggagcctttgaaccttattatatttccccatcattgatagtgacaatcttaaaagggttgttttcttaccttaagtacaaaagcatggaaaaatgcgcttttccttcccgcccacatcaccaccccgacttgaagacagtaggtgcttgaatggaaagtgagtaggcatctttaatcgccctgattaaaggaaagtgttagcctgagagggcctgactgaaaagtaaccaaaggcttaatatcaaacactaattagctttttagtgccttaaccctgacctggttaccagttttctgtagtttctacacccaagccactgaagtcatctgtggcccaagaggtaggacaaaaaaaaaaaaaaaaaaagctgatttcaatatttgatttgttgacatcccaaaatgaaagttttatgtttcccttagaaacatgttttgcttggttctatagtatgttacttaggatctatttaccatatatttgtatgagaaatcctcacccaagcattcaacctaaatctttgaaaagttgggtgctgtctttagtaacttttaaaatagtttaaatctcccattttaatagtgataaggaaacctgttaaaatcatggctattgatgttatagtatggaaagttgaactttatgaacccatacttttaaaaagcatttttaaaaatctaacactgactatagaaacaaattaaaatgtctacctttaagtataaaaattgcttaagtagatttgttccttgcctatcaaattaattttggcctggtgttcttcattattcatttgttaattttatcttgcctttgtcaataacagaaatgtttgtcattgaattgggaatttttttttttttttttgagacggagtttcactcttgttgcccaggctggagtgcaatggcgtgatctcagctcactgcaacctccacctcccgggttcaagcgattctcctgcctcagcctcctaagtagctgggattacagatgcctgccatgttgcctggctaatttttttttttttttttttttttaagtagagatggggtttcaccatgttggccaggctggtgttgaacttctgacctcaggtgatccagctgcctcggcctcccaaagtactgggattacaggcatgagccaccacacccagccaaattggggacttttaacagtcattttacctgtagaataatcaaaactcttcacttgatctgtagtcatagctattaacacagaaaaatgaatgccagttatgttgccataaaccaccttctgaacttggcaagatcttaaaaccatcaactgttctctgttcactctgtgaacttctttctactttacttccttctctacctcacctgtactctatagtcactcacttcaatgacacttaaagagcattcactctcagatcacttttctcctttccttgcccattcttatcttgccaactcccagtcctggataaatccaaacatccacgttctttgtgcatccgtgttgctcagtgctgctggggaacattttcacaactgctgttggaaccattgtgagtttacacattccagcctctgcaacgcctttattttccatctaatctttcctagcagagatttctatttgttttgttttggtttgagacagagtctcgctctgtctggcaggctggggtgcagtggcacgatctcagctcactgcaacctccgcctcctgggctcaggcaattctcctgcgtcagcctcccgagtagctcagattacaggcatgtgccaccacgctcagctaatttttgtatttttagtagagacggggtttcaccatgttggccaggctagtctcaaactcctgacctcaggtaatcctcccgcctctgcctcccaaaatgctgggattacaggcgtgagccaccacgcccggtgtcagagatgtcttattaaagatccccttcttctcttcttcctctcttctcccactaaatagaaactctcctaactttccttccctctactttaggtctgtctttacatagtctgctattttcaagaagagtttgacctgccctaggttctcatgtgcttgaatttccccctgtctattgagggccttgtcccattccatcttcccttctagatatctctcatctagataatctcaagatctatccattgattcttttttaatcagtgtactgagaggaagaaagagggcaaggaaatacatacttatgaagtatcttaccgggtactagatactttacatgttttcctcaagcatttactgaggaatgccagggccttgaatacagatcaaagtacctggctctgctgggcgcagaggctcatgcctgtaatcccagcactttgggaggccaaggtgggtggatcacttgaagtcaggagttcaagactggcctgaccaacatggtgaaatcccatcactgctaagaaaatacaacattagccgggcgtggtggcacacgcctgtaatcctagctacttggggggctgaggcaggagatttgcttgaacccgggaggcataggttgcaatgagccaagatcgcaccactgcactccagcctgggcaacaagagcaaaactccatctcaaaaaaaaagaaaaaagtacctgactccttctgtacgtgctgcctttaattctctatgcacacttgaatgtgtttaaaaatttgaaaagcactggttaggccgggcgcggtggctcacacctgtaatcccagcactttgggaggtcgaggcaggtggatcacgaggtcagcagatcgagacatcctggctaacacggtgaaaccccatctctactaaaactacaaaaaattagctgggtgtggtggcgggtgcctgtagtcccagctactcgggaggctaaggcagaagaatggcatgaacccgggagtcgacatctcgttactgcactccagtctgggtgacagagggagactcccatctccaaaaaaaaaaaaagaaaagcactgatttattctaataatagcttcctttctataatctctccctactattccatctgtatcacaattatgtcgtagtggctgatattcactatttgaaatacagtcccagcactttgggaggccgaggtcaggggttcaaggaccagcctggccagcatggtgaaaccgcgtctctactaaaaatagacaaattagccaggcgtggtggcacacgcctgtaatcccacttactcgcgaggctaaggcaggagaaccgcttgaacccaggaggtggaggttgcagtgagctgagatcacgccactgcactccagcctgggaacacagtgagactccatctcaaaaaaaaacaaaaaactacaggaaaaggctcatgataatggaacctacaataatgtgaatttaaatataatgcagttggcatttggctccccatacccacatttggttaactgaagactcactgtagtcatttcattaatcttataatatttatcttactgaatatttggaccttacagtattactagactttgtactggttggtaaagaataagtgtaataagcaataatattagtaatataaatttcagtgtatatagttcaagttaattgttagaatgcttaatgaccattgattaatgagagagatctgggtaacatctgccttgtcatacatattctttacaaagtatgctttaggagaatgaccatttattattgaattatatttatcactgtacataaagaaagaaatatacactcagagatctcagagttgctataataagtaatggaagatatttggacctcagtgggtgaggtagtactaacggtaagctgtaaaagtagtttgtaaatctcaccaaaacttgtaagtcacttaagaaaaactaaaatgagaatagttaaacatttgtagactaagaacattttcaagagatttagtatttttgttttatttttgagatggagtcttgctctgtcgcccaggctggagtgcagtggtgtgatctcggctcactgcaacctccacctcctgggtgcaagctattctcctacctcaacctcctgagtaactggaattacaggtgctcaccgccatgcccagctaattttttgtatttttagtagagacagtttcaccatgttggccgggttggtcttgaactcctgacctcaagtgatccacccacctcggcctccccaagtgctgggattaaaggcatgagccactgggcctggccaggagatttagttttaaatgatattctaacagatatcaatactttatgagaaagaaatggtttatgtattaaagctgacagatttagtcagttagccatactaagttaaagaaattgaaaatgaagcagattattgaacaaaaattgtcatttgaaacaaaacaaagtagcaatttaaacagactaataatttttttttttttttgagacagtctctgtcacccaggctggagtgcagtcgcatgatctcggctgactgcaacctccacctcctgggttcaagcgattctcatgcctcagcctcccaagtagctggagactacaggcatgtgccaacatgcccgactaatttttttgtatttttagtagagacaggatttcaccatgtgggccaggctggtctgcaactcccgaccacaggtgatttgcccacctcggcctcccaaagtgctgggattacaggcgtgagccactgtgcccagcctcttaatagattttctaataagtttttatgaaaatgcatttatggtttgataacaaaagtgaaagtataataattttttaagtttaaccctgaaacttagttattgtttattgaaccctgaaacttagttaaggtttgaaaaactccgtgaattgaaattgaaccagccgggcatggtggctcatgcctgtaatcccagcactttgggaggccgaggcgggcggatctggaggtcaggagttcgagaccagcctaaccaatatggtgaaaccccatctctactaaaaatacaaaaattagccgggcatagtggtgcgtgcctgtagtcccagctactcaggaggctgaggcagaagaatcgcgtgaacccaggaggcagaggtggcactgagccaagattgcaccactgcactctagctgggcaagagagcaagactccgtctcaaaaaaaaaagagtgaatcaaaataaaatgtagcatttaagccgggcacagtggctcatgcctgtaatcccaggactttgggaggccaaggcaggtggatcagttgaggtggggagttcaagaccagcctggcttgccgggcgcggtggctcacgcctgtaatcccagcactttgggaggccgaggcgggcggatcacgaggtcaggagatcgagaccatcccggctaaaacggtgaaaccccgtctctactaaaaatacaaaaaattagccgggcgtagtggcgggcgcctgtagtcccagctactcgggaggctgaggcaggagaatggcgtgaacccgggaggcggagcttgcagtgagccgagatcccgccactgcactccagcctgggcgacagagcgagactccgtctcaaaaaaaaaaaaaaaaaaaaaaaaaaagaccagcctggccaacatggtgaaaccccgtctctactaaaaatacaaaaattagccaggcatggtggttcacacctgtaatcccagctacttgggaggctgagacacaagaatcgcttgaacctgggaggcggaggttgcagtgagccaagatcatgccactgcactccaggctgggtgacagagcgagactccgtctcaaaaaaaaaaaaaaaaagcaaacaaatggccagacgcagtgtctcacacctgtaatcccagcactttgggaggccgaggcaggtggatcacctgaggtcaggaattcgagaccagcctgactaacatggagaaaccccacctctactaaaaatacaaaattagccgggcgtggtggtgcctgccctgtaatcccagctactcggaggctgaggcaggagaatcgctcaaacccgggaggcagaggttggggtaagctgagatcttgccattgcactccagcctgggcaacaagagcgaaactctgtctcaaaaaaaatagtaaaaattaggccgggtgcggtggctcacgcttgtaaccccagcactttgggaggccgaggcgggcggatcatgaggtcaggagatcgggaccatcctgtctaacacggtgaaaccccgtctctactaaaaatacaaaaaattagctgggcgtggtggtgggcgcttgtagtcccagctacttgggaggctgaggcaggagaatggcgtgaactcgggaggcaaagcgtgcagtgagccaagatggcgccactgcactccagcgtgggcgacaaagcaagactccgcttcaaaaaaaaaaaaaaaaaaagtaaattaaaataaattaaataaattaaaataattaaaataaattaaaataaattaaaataaaattgtagcattgtataaatgagttagcactaaagataaaatatatacaatttaagacagtattataacgattaagaaaaaatctgagtataaattctgatagttcagaggaaggc

SEQ ID NO: 94258 - DNA, 14507 bp, Homo sapiens
ggctgcagccacccacccggggcccaggatgaaccgtggccagcacagggcagaggcaggcgtgcttccccgcctccgtcagtggtgaggccctcgtgcctcagagcacacgcggcggcgtccgggattcgggaggcaggagccaagcgactcggggaccagaacaacgctgcaccagggcagccgcaggtccacagccggccacccgggcctctgcctggctgagctgagactggggagctccaaggcccctctcctgccccccacaagtcactgagggacagcagggcgcgtgagagggtccggggtcccctggtcctcgactcccacacgggcagcttctccttgcaggggccctgtgatgacctccaaactcccgggctctgaaggcaccgaggcaggaacggcactgcccggtgggtcccgggtgggctggtgggcactgttgagtggcggcggccccagggcccacctgcgaggttctcatttgtgcctccttcatgctgggccagccccagagaccttcgcatcagacctgatctcactcataggcacccacccagagcagcacctccgtgcagcctgacaagaccaggccttgttcacctccagtagagaaacggcctcatcacgccagcatcggccagaaacacaagcacagacgtgcctccaaagtttcactgaagtctgtgttcaggccacaaaggatgcgtcgtcgtcttgtccagccctgggggccgcagcagtcagggcctctcaggagcagcttttctgtcccctgcttgggggtcccatagggtggcatgtggacggcccagccatcccgcgtgtgcagtggccgcaaaggcctgtttcccagcacagctgatgtgggtcccagcagggcaggtcttcacagctccttcagatgggacacgtgcggccctcgctctagtcggcaaaaacgagccacacacaggtctgcggtgtcgctcctgggtgcccagagcccaccgagcacagtggagatggccgagcccagcctcgaggcccctgggccgtcgctcacctgtttacacgggctgggcgtggctgcccacagcccctggatctgccgcgcaggattcgggaagaaggcccctcggcagctgcagacttcagcctgggctcctgctgtgcgggcgaaaaggcccagctgaagcctctttccagggccagacccggctgcagcgtgggagccgctgggtgcccgccgtgccgtgggaaggaaggtggtggctctgaacagccagggagccacagcgtgggccggcggatgtaacaggagagcaccggccatcgggagcacctaccagcagtgaggaccatggagggcagatggccttgtccctgcccagggacagtccaccctgcagggttatttaggactgggcagggcagggccacctccgttagttggggggcggggggcgggggtgcctggcaagtttcataggaagatattcagggcccttccttcaaagggacctgggcagctggcgtccccgcctctggactcagtggtggagcagggaggtccctgtctcaggacccctgagtctcggggccccaggagcccagggccaccagccgtggaggagccctggccttctgccttccacacccaatcccactccgtgctgctgggtccttctctacgacccaggctgcagtggctccacgggcgcaggccacacctgccatggagacagtgggcacagggcaggggaggtgggcgcacacagcctggctgccactgccatctcctgggcactgggggaactgcccccaccgccacacctgtgctctctgcagggggaaaagtgccaactcagacctggcgagctgagccactggggtctgaggggcccagatgccaccgtgagcagagccatgggggagatgcacagacacgcgtgtgaagcctgggggccctccttaccccttccctgccctctgtccccgccaactccaggccagccccaggagaggggctcagtggcgtctctggcacagaggagagggagtgtggccacctggacccctgcttctgggacagctgagcggcctttgagaaatgcagatcccccatccagactcaaacacaccctgcggctgcctctgctgcccctggagtttgggagcagcttcctcacccaaacccactcctgctctggtggccaagggggcagggacactcatgcggcatccctgctgccgcctagggctggagactgtccttagtaccctgagcagcacccagaatccaaagtctgtccccggaaagtgccctcagggccatgcggcgtctgacgtggcacagaagtggcctggatggggacacagaaccaaactgcactcatttcagccaagaaggctcctcttagcggcataagtctccctttctgttgccaggaaaagtgccctcccatcaagcaaggcttccgctaagcaaggctgcactgtgaggtccacacacacccaggcgatggaggggtgcgggctccgctcagcaccgcactgaactgagcccagcagcgcagtagggactggcttctccctgggaaaggcttcttgagaggctgaagctgcaggagagggtgatgagttgagaagctcagggtgggccctcctgggaggaccgcctgccctttctaacactgctggccctcggaggccctcagccacttggcagctgcatcccccatacccgggacctccccaccaagttctcatttctccaatggcagccttcagagctgagaggccgagtcaagagggtgccatctcccaagttcccatgattcctggggagcgtctgtgtagctgcccacctggaccgaggtggtccccacactgaggccaattggttgggagtccggggttgacctgggcaggggacacatcaaaactgctcgaggccaagcgcggtggctcacgcctataatcccagcactttgggaggccaaggcaggtggatcacctgaggtcagaagtttgagaccagcctggccaacttggggaacccttgtctctaccaaaaatacaaaaatggttgggcgtggtggctcacacctgtaatcccagcaccttgggaggccaaggcaggtggatcacgaggtcaggagttcaagaccagcctggtcaagatggtgaaactccgtctctactaaaaatacaaaaattagccaggcgtggtggcgcgtgcctgtaatcccagcagctactcactcaggaggctgaggcaggagaatctcttgaacccggaaggcagaggttgcagtgagccaagatcgcgccactgaactccagcctgggtgacagagtgagactgtctcagaacagcaacaacaaaatgcccgctgctgctgggtccagaagagcttgaataactgcatgttctttttctcaattttcatttcccagaactgggcacctccgggctgtgaaaagttagggaagtgtctgacacctccagaatccattcccaagaagtgcctctggtcccactagcacctgcgcagactcaggccaggcctagaatctccggttggccctgcaagtgcctggaggaaggatggctctggcctcggtcctcccccaaccctgcccaagccagacagacagcacctgcagacgcagggggactgcacaattccacctgcccaggacctgaccctggcgtgtgcttggccctcctcctcgcccacggcgcctcagatttcaggaccctcctcctcgcccacggcgcctcagacctcaggaccctgccgtctcacgcctttgtgaaccccaaatatctgagaccagtctcagtttattttgccaaggttaaggatgcacctgtgacagcctcaggaggtcctgacaacaggtgcctgaggtggctggggatacagtttgcctttatacatcttagggagacacaagatcagtatgtgtatggcgtacattggttcagtcagccttccactgaatacacgattgagtctggcccagtgaatccgcatttttatgtaaacagtaagggaacggggcaatcatataagcgtttgtctcaggggagccccagagggatgacttccagttccgtctgtcctttgtccacaaggaatttccctggacgctaattatgagggaggcgtgtagcttcttatcattgtaactatgttatttagaaataaaacgggaggcaggtttgcctaattcccagcttgatttttctcttggctgagtgattttggggtccggagatttattttcctttcacaccttctcagcagctgccaagaatcaggtgcccagctcccgctgcctcccggccggcctcctccagaggccagcgccacattggttgttgaagggcaggactcggggctccttgctgttcccacgccagcccaacagcccgggttgaaggaagccacagggccaattctgtgttgaaccctccccaggcccctcctccagtacccccccaccccacgccttcccaggcccccctcgggccatctgggagacagaatcaggaacaaggaaggggaaggcggaggcctcctgggctggacgtggacggctgaagtgtagctcacacacttggaccggtggggccggctcatgtggcagcttccccggggacgtgaggatgtcagggtcctccatttccaccttccctaggggtctggagcccaggccccaggccttgccagccctgaccaccgcacactgcgaggcagccgcccctaccacgccccttggcatcagacgatgggtcccccacccgccctggaaccggggccccagcagccgcatgcagcctccggcctccccctccgaaggctcctgggggctgccttccactgagtgggttttcccttctgcagtaactgccaggccaaagctgaattgtaaaagttgcgaaatgatgggccgggcgcggtggctcacgcctgtaatcccggcactttgggaggccgaagcgggcagatcacggggtcaggagatcgagaccatcctggctaacacagtgaaactgcgtctctactaaaaatacaaaaaattagcagggcgtggtggcgggctcctgtagtcccagctactcgggaggctgaggcgggagaatggccggaacccaggaggtggagcttgcagtgagcccagatggcgccactgtgctccatcctgggcgacagagcgagagtccttctcaaaaaaaagttgcgaaatgaagaaaagtcttggaatagagcacaaggcattttagctctggggattttcttgaaaggaaattgtgtttggggggagttatgcctcacacaaccccctgggtaccagtcctcgggcggccagggggttcacagctccccaccccaaggctaaggggtcacctggcctctgcaggcggacagaagggcttctgccctcgcggatgcgcgccctggcctggccacaccttccggcctccctcccccgggtccgggcggggaagagccgcctcaacggcagggcccatccgcgagaggccagcgcccccggccggtccagcccaggcccgccgcctccgccctgggctgctccctccgggccctgcaccgccctcctgctacttggaccgcttcctcacgcccttctccaccccgcgcgccagcctcccgcgcgcagcgtggggatctcggccaataaaggagaaagggcgcggcccgtacgcgcgccaggtgcgtgggcgagaccagctcacgcccctcctccagccgccaaggccccggcccacagctgcctggctgcagtcagaagcgtagcccgagacaaggaagggcgccttgactcgcacttttgtccggttcgaacgttctgctcagtggtgcgtggaatgcgagcgcgtcttaaaatcgatggcgcctaggagtccatgaaatacggtacaggcttccggcgacggatgccccgcccctcacccacgctccgccctccggggatgccccacccctcgtggcggtcccgcccgtccccgcgcaggcgcgctcgggctgccgcwggctcttcgcacgcggccatggccgactccgagctgcagctggttgagcagcggatccgcagcttccccgacttccccaccccaggcgtggtattcaggtgcacgcacaggccgccctcgtggcgccccgacctgcgggcctacggatgggagcgcgtggcccgcgacctccgggcgggcggggcgggaaccctcgtctttcgcccccggggccctgccctccttcggccccggcgtcaccaggcctgtccttgggtccagggacatctcgcccgtcctgaaggaccccgcctccttccgcgccgccatcggcctcctggcgcgacacctgaaggcgacccacgggggccgcatcgactacatcgcaggcgagtgcccagtggccgcatctagggcscttccgcctctgcgcgcgccgagggcagcacgtgggctctgcgcgtctgcttgggggagggcctttggggtgcttcagggggcgccgggacgggcgccgtgcttgggtcgcccgggaagggttgtgagattgagcccccgaggccgccgcgctgtgcaggcgtccttcccgcaggttccgggtccccagcccaggacaggcgtgaccgagttgccgggtcagttggtctccctggagtgcccaagctgaatccacagggcccagctgccttgcttcttgttccttctgcgagctggtattgagcgcctgccacgagccaggccttccctgstgaagatcacggaatgcccacccagggaagggaggcctggaggcctccgggagagcccaagaggtggcccagggagaacagagtgttcctggccgtcttgcctctcctagggtgtgacagcccactccctggacactgccctgaggaaagcgccagctcttgctggagycacaacactgccagagctcccttctcacctcctgcaggaagccctccctgacctcctgccaggccggggcagggtttccctgagcgtcccccaaccatcacagctcaggccacctsgagagactccctttttagacagaagccctggtgcagagctgcctttgagagtaagctgaggcctgtcaggtttctaccagcccagttacagatgggctgctcagctcagagagaggggtggtgactcccctaggaacacacagctaagaagtggtcccttaaaagacagacccaggtctgcactctgayctggaagcagctccgggtaggtgatgggtaacattccttaaatggtgcatgtcactggcctttcagctgggagccaaccaggtaccccttgccaccggccaaccctggcccctggggattcccatgctgccgagtcactcctgtcacttaccctgacaggcctagwctcccgaggcttcctctttggcccctccctggcccaggagcttggactgggctgcgtgctcatchgaaagcgggggaagctgccaggccccactctgtgggcctcctattccctggagtacgggaaggtaagagggctggggtggccagaggaagggcagggcyaggccaccgtggccactctcccccagttctaaaaggccttcccaggcgtgtcaagtggagctgctgtggttacagtggccttgggagctcagagaggttgagacataggctgggctcacacagccagstaacagcarggtggggttggagtcagggtctagggtggcagctgccaagctgtgcaacaaagctgttttctgygggaggctgaggaccacacaccacttcccactccaggctgagcyggagattcagaaagacgccctggagccaggacagmgggtggtcgtcgtggatgatctgctggccactggtggtaagggtctccccgcagccaactgctgtggctccaagggcctggtgggagtgggacaggacctcgctgtgtgacatgggatgcagcttactgttgtccagagggtgcctggtggccaggccgacaccttcctctccccatgccttcccctccccaacccaggggctggcctggagcacctgctctctgcagcccaggccaactggggacctcaccctcccatccccaggaaccaygaacgctgcctgtgagctgctgggccgcctgcaggctgagktcctggagygcgtgagcctggtggagctgacctcgcttaagggcagggagaagctggcacctgtacccttcttctctctcctgcagtatgagtsaccrcagggcctcccagcccaacatctccagctggatcccagggaaatatcagccttgggcaactgcagtgaccaggggcaccggctgcccacagggaacacattcctttgctggggttcagcgcctctcctggggctggaagtgccaaagcctggggcaaagctgtgtttcagccacrctgaacccaattacacacagcgggagaacgcagtaaacagctttcccmcaagagccgtctcctgtcctcctgttccccagggcagggagccccaggacaacaccagacttcagctgtactgtgggcatgtgctgcttggcgtgatgcccagcagaacctgtcctggttctcacctcaggagctagaaccctccaggcactgcaggaagaggccatgtgggcccatcttctaggggagcaagcgagggctcttctgcagatctagtggctgtaagcatgactttattagagtttaggaggtcagaaatactgaagtcaaggtgtgggcagaggccagtcccttctggaggctccagggatgtcctacttgtcctgcccagcttctccaggctgcctgtgtcggggcagggccgcgtcttcaaagctggctggctctggccctgtcatgaaggccctgtgatgacatggggcgtagctggacaattcaggatcacctctccagtcttgaaatttttttttttgagacggagtctcgctctgtcacccaggctggagtgcgtgcagtggtgcgatcttcgctcactgcaagctgtgcctcctgggttcacaccattctcctgcctcagcctccctagtagctgggacgacaggtgcccaccaccacacccggctaattttttgtatttttagtagagatggggtttcaccatgttcgccaggatggtctcgatctcttgacctcgtgatctgcccaccttggcctcccaaagtgctggggttacaggcgtgagccaccacacccaccccagtctttcttaatgacaaaagtcaccctttgctgtgggaggtcccatattcagaggttccaagattagaggggatggcctgccacccacactacccaaccccatattgccacagagcccccttcacccccagccacactcccgatggccccccagggggtgctggatctggcttcccttccccaccagcagcaaggacagaggtgcccacagaaaccggtttaatgtgaatccaccaggtgagccccatgaaggggcccaccgcccgcagccagagaccctcgggctgtgcagcctgcagcccacatctgcctctggccctcaggggcgctggggaaaggaaggccaaagtgtatcatgttcataaaagaaaatgctggtgggcccaggccagcgagcttctgaagcccacgtctgtccacagtggcccccaggctcacagcccctcctcagcacgtgtctggtgggccaggcgtgcagtgatgtgggcgaggtccgcggccttgtccagcttgacgtaggtgtcggtgcggatgcggtggaggctgagccagtccggcagcagctcggagaggagcagcaggtgcttctccatttcccctgggggaggagaggaggacactgaggctggtgctgggccccagccctgcacgggcagcacttgaaaccagcctgaccacccaacctctgtgcctgcctggtcgccctcagggccccatcaccaggacttagggcagaggtggttctgatcagaggcccaggtctgggtggtgtgaacagtgaccggagagagccaggcctacagttgaggccctgtgaggaggcaccgagcatggaggccgccagcccatgaaagccctgaggcaggaggtgccctgtagcgtcaggacccctatgtgctcagggcctggtcaccagaggcctgggaggcagtggagggtgcatgtggggccccttctgaccaaggactgcaggtggtcagggaaagggccagagctgtgagggggaagctgcctccagaggctgcaggtgtggaggggccgggcggaggctcaggggtggctccaaggagggcagagcgcccaggacacaccagtgcaagaggccagcgcccactgcacatctgaacagaacagatcagtgacagacacctctgctcagaaagctggggaggcagctgcagcaccaggcaattccaccctgcacgccccttcaccccgccctgcacgtaccagggctcatgatagtacaacagctgcccaccatcctggcacaggccacctccatgctgagcgcaggcttgcgttcggacacaaagacgctccgcagcacrcgggccagckcaggcagccgttctaagcgctgcagccgctgctcctgctccgggcaccgcgtcatctgtgccagctgcttctgtgcctccttggctcggatctgcagcaggtaccgggacctggttagtgggcagcaggtcaccaggcgcccacccgccatcactggggacgactcacccgctccagcagatcctgggacacccccttcagagcactgggagaggctgcaggcggggtggctggtggggtagccggcagtgctggcctgggagacccggggctgctgggcgcagcagagcgcagggccaattgactcaaggccttctccatctgcgggagggacaggttggactggagaggtcacaagatgcaacgtgcccctggctgtctgcccaggagtccccggtatctctcaaggcacaagttcacccagcacactgggtggtctgtgccggtcaatgcagtgtcccagtgtgcagcatcgcctgcccaggccaactccccacatggggctagtggcagagccaggcttagaggctgcagctggrgacagagggcaaatgccaccaactctctggatccgccagccaaggaggaagccagatgaggcgtcaagctcatcaccaaggcttccacctcttaagcctggggtcaggctggcccacccacccgggagaaatgggctgcccaagcctcgcagtctcaccctgggtgaaatcaggttgcgggcccgggccagcacctcctgagcagtggtgagcttctccgtggcgggtggctggggcagcgcggccggctcgatgtcgggtacttcatccacgttgaagcgcgggtgccagcgggtcagctggtcctccggcaccaccatggcggggctcagggaggccaggaaggcctggggagaaggagtagatgggtgaccctgggcacatctgagacaagggcagactgcatgtgaggtaggcctgtgcttacgtcccagccgggccgcctcgggcaagtcactcagcctctgcccagtgctcagcttggagggagagcacaaggcctcccatggtccgcgctcgctgaacgccttggggacctcctcagtgcctgcggctgcaccctgagcacaccagccctcagctcagggtgaacccagcccagttccatcccgggagaagctgtgagtggcagggatgctccaagcacagggttaggtgctgaggcagtgctggtgccaccatcttcacacagcggggccgggggccgctcaccttgtggtgctccttgacrtgctccaccagcttctggctgaagatctgccgtcgctgcaggaggcgcgaggccgtgagctggggggctgctccgtcagcctctgtgggacgagtccaggcctaagtccccaccaggccacccagccacccacccgtgaccagtcctgggccagatgcccagcacctcacacccaccctggaaactgtgcggctcacagatggggaaaccgaggtcccgcacccagcactcaccctgctccagcagtggctcgatggtgagctggtaatctgacctcctggygccatccttgaaggtggggacactgcgctcctggcggaagcggtaggaggccgggtacacggttttgatctggccaacattgcrctcctcaaaacgcctatgggaggatgggggcggctcaggaggcaggcccgggcccacccccaactccaggacagccacagcccacccccggccactcacctacgcatcatgtcctggacgccccgctggaccttggcaaaggtgggcgtctcggagcggttgtggagcatgcccacgatggtgtccatgctgcggaacatctccgccagcacctggtacttgtagggcagcacgagycccggcaggccgggctgggccagggcatggaagcrctggtaggcgggcgccttctcgccactgtcagggagggaggagcctcatgagaagcagtaggcccctacccctccaacgccacagcaggcccctcggccagggagaccctccgatggggcctgccatgccacacacgatggctttcgcggcccttgcacacccaccagcactggcaccgttaggggtagcagtggtgacgggaaagcccggctccacaccccagctctgctgtgtccacgcagctcccccagggaagctctgccctctccccagcgcagtttcgtcagctctcaggggcagaggcagacaacacaccaatgcatcaggagcatttgaaacctgccagagtccccgaggcaggagctgccccccgcaggagggactgagggcacagcgccagcagtgcccgggacctttttctcaggggtctgggtccgcgccctggtgacctcaccaccaccctccctggaaggagcagacctgggcctctgacaggctcgctgggccacgcctgccaccaacccggcctttgccggggcctcgtggccgcccacccagcactcaccatggctcctcagggcggccctcggcctctggggtgcaggactccccagcatcytgggcactggccttcagcgcccggactcttrcccccagctcccgggcccgttgcaggcatgacgcaagctcagagatggtgtccttcagggggatcaggggacacggtgccgtcaggcaggcaggcaggccggcaccactcagccctcccgcatctgccccaggccccgcccctcacctggtcctgcgcggatgtcaggtggggcggctgacctgctgccggggtggatttctttatcttctggcccggagaagggcaggctgggatgtctggggcctcgggggtactggggctggaaacctggtgggagggaccccaagggtgaactcatgacaagacctggtgctcctggctctgcagaggaccccgaaggatcagaagccgctctgagttaactgggacgggcatggctggggggcttaggacttcccgtagatggtggtctgtgctaaggccggggacacagccttgctctcgtcttccggggccgtttccaggtcggacccctgccctggcctcgcagagaagctggacttccagccccatcatcggatcccggtgcaagccccccagtgcctcctgctcatctcaggagccagccaagtccccagtggtggcagggcgcccccaggatcccccggcctgtcccagagttccctgcgccccgtcccccccgcctgtttccccgcccccgtccctccgcctcagtttccccgagccctgccccccgggcctcagtctccccgcccccaactccccggcctcagtctccccacgcccctcacctcgtccaccgacagccgcagtctcctgcgggccggtggcctggcctggtcgcgtccgggggcggcgggcgggcgggcgcgcttgcggctgccactggtagcggaggccggggcgcggagtgcgggcctggcggggctgggggtgcggcaggccagcttgggcggcgcgatgcgggggggcccggggcggcggcgcgcgaagaagtcggtgacgcggcgctgctccatggcggcggagtgcgcggcgaaagcaaggaaagaaggaagggaggaagaggcgggcgcggttcccgccaaatttcccgcgggcgccctggccccgcccccggcgcggaccgaaccatcggggcagagcacggggggagggaagggacggggcgcgcatgcgcgctggtgggcgcgggcaccggcttggccgcgcgcatgcgccgacgtgcgggcgtggactcgccggcgggcgccgtcgtgcgtgggactttagcgcggtctccggatcccgcgtgtggctcccacttttcagggcgtgtcagtggggccgctggcttcagggtcagaatgagcgcaatccaggcaaacagcagcgcgcgcctgacaaaa

SEQ ID NO: 94259 - DNA, 55181 bp, Homo sapiens
  misc_feature (1)...(55181): n = A,T,C or G
cagaagtggaggtctctgtcctgggcactttgacgactgtcccctctgaaagcacagccagtcgggctccctggctgcatgcacggccgcagaagcccaaggctgcttatgtgcacacacctgactccagcattccacgactaacagcgcctcatcaggcactgtttccttgggcttaaaatggggatgctgcctaacaaggcttgtgaaaacgccctcatgtaaaaagtacttacaggtgggtctggctgcacctaacagaaaacccaaaaatcagtggcttaaaccagagaggggtgcatttattttctcacattaaaaaaaaagctgaatttaagtagtctggggctggtatgtcagcaaaggcccagggtccttcccgcgttctgcgtcagcaaaggcccagggtccttcctgtgttctgctccactgtccttagggtgtgaccctttcctcacgctctcaggacagctgtcccagcaccagccatcacatccatgttccaggcaggaagaaggcaaaggggaagggtcctgcatgtggcagctgagtccccttcacaggagcttccctgcaagtctctcccagcaccacccacctccacgccacagctgcacaccccgggctgcaagggagcccaggacatggctctcgtctgcccgctattggaactgggcagaggcaccggggttctgttagtacggaggaaagagaatggacgctgggttagcaacttgcagagtccccaccacagccaggactcgggcaggagtgatccccactaaaaggcaaagatttcatgccaggctgcaatggggaagtgcttgggctggggtcccaccttctcctaacaaacatgaggctcttgttaaagatttaaccttgtgagagtggtctgtggcccacatgcacccagatcagctgcctggtgtgcctcggcccattccagggcttccaattcaccctggggcgggggaggcctggggcatgcagttttcccacactccttgctgattttttcttctataatttctaaaattaacactgtgcttgctagatgggatgaaaaggcaaatatgtatcaagaaagttcccctccctaggtcctgccctaggctgacccccccttacagcctttcctgctgcaagggcttctggggtcctcaaggtccttgagaaactctccagtcctggaccagtgctggaaccaactccgggggggtcccctcagcgggctgagccttgaccgctggaccccaaggacgccggcggcactgacgccactatgggctcggccgctgccctgggtggtagtcagccacgtcatcaagtgacacagcacccaaccccctcagcaccaacaggcaggagggggtgcctcaagtctgcgctccaaggtttaggaccagggctgcagctgagccaacgccgcggggccacgaggcttcccaggtttcacaagggctccttttaaggccgggcggaatccagacattgagccagatgcaaagaatggaggccaagtccagaaagaggagggccctcccctgtgggaagccacgccggctccccttgtgcccctagatcctaggctggttctgggctcaggaggccaccccctccagaccagcccacctgttcagccagtgggtgacccacatggtcacaggtcctgcaggctcaggaactcttggctccaggcacccctgcctctgcccctttgggacaactgaggacaggctacctgcgccatctgatcccaaacctctgcccacaccccagaaaagtccttagttgaattcttcttaattaaatccttggctgacacggaaggaaaaagccaaatctcctctcacaagacctttagttgagagaacatgcacagctgcctgccctgaaagccccaggcgtcccattcaggaagaggcaaccagaacagaccgacggccccaccacartcgtgcgcgggctcctctgcgatggctggcagcacagctcactcagcacacctgtatcatcatcgacgtcaccatgttatcaaaggccctgctaagagaaacagacccactcagaggagagccaggccctccacccctctgctcagagacgggccgggcagcatggctccatccacaggatgctcgggaccttctccagggtccagaaatgtgaactccgctgagaggccaggacaggagtcccaccccaccgggcactgagaacccatctgctgcctccaagttccctgtgcagcctcccaaggccccaggaaggggtggaggagggagcagcatgggcaggcagagcggtggtgtggcaaggatggccctgtgcagcccaggaggcaagactgtggacattcgcctgcctgctcccatctgggaccaggatggccccaagacagtgtcctggtggagggaggggcctgccttggatcactgcagcgtcctcttccctgccaaccacagggaattatgtcttggaactggggactcactgaaagcaagtctggaatgtgggcatggaccccacatttccctcatgatgttcaaaagttaaatctgtttactttgtggactattcggaagacacctgcaaaccaggttcctgactgttccaaattcaacataaaagatcaggtagctacaaaaggacgtgtgatccctgaaagccactgcccatgtgcttggccctgagtcctgcaggtgccccaggtacccactgggcacacctgggaagccaaatgggcaagctctactccccacaccacacacactctatccactttatgcgctggagatctgtgtaagagttggtgtggagaaacggggctttgtggctttaaaacctctgccctagggggatggtgctcatagcttaaaaagatctttcctcccttattttccaaatggttgcattttggcaaccaaaatggcaaggcatgtcctacagaaagaaggtggcaagacacagaaagtagggcccacctggactggatgcggtcccccgggttgtagaaggggttgcacatcacgtctgtgtaggagttgtgtagcttccggaacatctgaaaaagacccagcaaaccatgaccttgccacatacacacagccactgccagatttttagtttctcagcatttcaaaacaaagtcaaaaaggaaaaacaaaacacccactcgggcgtggccctctaactccctgacttacgctgcgaatttcgttgtctcgaagggctgtgttggaggaatctaccaccatgacaaacttcaccttggarttggtgacgtagccgtatctgcacagctggttagggaaggcactcgtaacacagggactgccggtggagggccctctgtgggccctcactttggagaaatgtggcaaccttgaatcacaggaaatgcccatgctgggctggtcctgcagtggccgtgctgggtacaagcctaaatactttgctagggcgacgtctggtgtttgcaggagaagcgaagagcaggcagccaagccttacccagttcacactccaggagccgaaccacctagactccgagtctgtctgtctggaacacctcaccctcttcatgaatcaatgcctggcccggaaagttaactgcaaaaccagaggcttcgtgaacaaggcggatcccctctctagaggccacattattttgtaaaatagtggctactagcaaatgtcaccatggacaggctacatgatgacttttgggaaggtctttgaattccatggcctcaagtgatttgtcccaagggactagacgagtgtctagtgacataagaggcaaggcctaatgaaataaatgaaactattatcccctgctcaaaggtggtggctccccctgaaaagcacagaaagaaatccttgcaggtacaaagcagaagtgtcccacttcctctgcaaaccagacaacggacacgtgcaaaccaaaacattctacggggaattctagccttgcttttcccaaatggctcttccaatgaaagagaagagttacaggccttcattcacctcaagctaccctaattccctggctggctaaaaactctcacctctttttcttctaaaaggtttcaagttatctgatcctaaagtacatcttgcaactgtaggtcctccctgacacacaccctgccctgaaagatacaccttgtagtcctccgtggggtagagcaggcccaggtacagctccctctggtcgaccagggccttccccattgcggagatcttctcatccaccacgtccagagatgtgtgcaccatgtagtggaacttcagctcgttctccgtaggggtgctgcgaatgtagagggggtaattctgcaagaaaggatgacggcgactgaaaggacaagactccacccagcgcacaccagctctgaactatgctgcagagccgtgacctgcagccacccggggaacgcattcccatgctctaaggcccaccgcttcattctctatgccgcagtgggcactgccttcaggggatcccagctaacctaaggagatttatgtgttgtttgcaaagcagcagcagtagggtgggcggaaaagaaaaaatgaatcagaaaaatgggcctgagcacagcctgccgatcaagcctggcacctgggcacgcctctcaccttctcctggaggccactctgcctcagcccacctctaactctgcatggctcacccaaatacagcaccctcaatactggcttttcttcaccttgacagtgacccttttactaaacccttcaagactcagctcaaattcccttcatctctgcatttctgaccattggaagcccagaattaacagcttctttctcggtctttcacacaccaccatttaccctgtgtgtgttcagcactgggtcctgcagaaatacagtgaacaagagtcctcgctaccctcgtggggagtgatacctagtcaataaacccacaaacaagcaaatgatcatcttggccaagagggaagcccatgagcagcttagcagcagccaccgcccagcagggagcggtctcgagtctggtctcgggagaccctggctaggaaatgaaggctccgtgcagcaggagcgtgtgggcagccacccagctcagtcttagccttcagaaaatgctttccagttgaaatgtatgtgggccagtaaagaggatgggagctggggagaggtgttccgcgtgcaaaggcccasaggtgagagggcagagcatgtccagggagctgcagaattgtttggttggagcggagagtgccaagggttatggggggaaaggatcccagagcaggttattcagacagcatcctaaggcaacgagaagccactgcagaggtctcaggcagaggcgtgacaggatccgatttgtttttaactcggctccggggagactggcaggagggccggggccgccgtccgcggggaaccagcgctggacgggagaacgggcagaacctgctgaggacggaggacggaggtagtgcccgggaccacctaggtttctggtgggtcctggcggggaggagacctgctgcgccgaggggtgcgttcagcagcgggacgggcgagcgcggaactggggtctcagtcagggtctgcctggcggctcgtccaccgcgaagcccctgaccgctggagctcggcgaaggcctcctccaggtcccatttcctaaggtgccttctaagcccagggaagaagtagaaagaaagcggagagccgaggatggtgcgagcccggacgccccacgccgcgcgtacgcacctccttggcaatcaccgcgatgcacaccgccatcttgggaggctcggcgccaggcaccgcgtcacgtgacccgccgctggtcacgcggcctccaaagccccgccccatccgcacacagctggctcaggccccgccccactggtcacgaggcagtccaggccccgcctcccgtccctccgcggactctggccccgccccgcgagtcacgtggccgtccaggccccgccccgcagcccagccggaagggccggcggacgctcgctaggtcggctcgctggccggggctccgcggctcccgtggttgccatggcggcggttgtcgcggcgacgaggtrgtggcagctgttgctggtgctcagcgccgcggggatgggggcctcgggcgccccgcagccccccaacatcctgctcctgctcatggacgacgtgagtgcgggcggtgggacggggcagggccggggtggggcggggaggggaggggcggatggagggaggagcgaggtgggggaagggcgggcggggtggggggagaggtgagggaggccccttggggaaggggggaggccccgctcggtgaggaggagggggaggggacggggggtatccccgtgcggggagggggaggcccctcggggagtggccgcggggtccaggcgtggggtctcggcggtcaccgatcaccacacgcgctgccactgtgctgcatgaccgggacagcgtcctccctggcaggtgggtggccggcgtgctaccgggccctgcctcccccgtctgacctttcccgccctctactcttgggaaaggtgggcgcgcagcgtggcctccccaaagggaggaagaggctgctcctgccgccctgcctgagagctgcgtcgccctaggaatcactcccgccacctcgggccgccgggtccccccgctgggctccagtcttacctgacggctgtctctgtcctctggagaatgctgagcgaaggtcaggtgtccctaaggtctgaagaactgaaaggctggaatgtctcctggtgggcaagtgcggggtcaggggtcacagccagcctggaggcctccttccctaactccttgtgggagccacctggagactcaggaatgagcctgcctggggcatgggtcaccgtgcaggaccccagacacacctgggttgaaaccctactgtctccaagcttgggggtcacttccattcttgaacctcagctgccacacctggggggttacacctgtcccgccgtgctcacgttgtgtgtgaggactgggacgacaccgagtaccagacagttttgggccgtcggtgtcgctcagcccctgtgtgctggctccgaccagcagagaccctgacaggtgccttcagacccacctgtgctgaccagtgggggccacgggccacacccaagggctgggcagtcgtggctgtcggaattggaaggtgctggtagtgtaaaatacacagatttagaagacttggtgaaagaaaaataatgtaaaatatctcacttaacaattttattaaattaatggttttttaacataaagatatacttgaaaagataacagacaccacccataatttccccacccaggggtgacagccgacagtcctgggcagctgcttttccatctcatatgtcttatttgtgtgcagtgactgctttccagagcacgctctccagcgcccaggggtccgtgtcctgacagcagtagccgggcctttctctgcactgagtggcatctccctcctaaagatactttgcttcagaatttcatcctttcacttttgaagttcctctgggccagtgtagatactttgtttcagaatttcttcttttcattgtgtaactccttctgggccagcatagcttcgctggatgagctgggctctgcaggtgaagcctccctgttaagtttctgcttttcctgactttctcagaggacagagggstgaggcggggcagctcatgaataattttttatgttgaagacttgtcgaaataatattttggttatgttgggttaaataaaatataaagttagtctgtatttcacctacttctgcttttctaatgtggctcccggtaaatakggaattgcatgtggactcaccctacgtttccataggacagcaagggttcaggccgtgcagggtggaggggtggggtgtggccaccggggcacatgtgggggagggtgacaggaagccccgcccacctgggcacctgttctgtggcctccactgtgtggcttgtggggtcgtttggcagctgacgcctaaagaaccccagaggagctgtgtcctggccggtaggtgtacttgtaaggactttctgatgcagacagcagaagatgaagtcaaagtgacaagcaacagtggggattccctggccctcctgagtcgacagaccagggccgcctggcgagtttcccctttcgtggctctgctgcctctgaactggccacatcctcactcagcctgtgatggtcctaggtgactccaagtcacccctgcagtcagcagacccagtgggaggttggctctgcccgtgtcatgttagcstgatgtgggtctcagccctgcgccaagcacactgggggaggggcacatgctgacctgtccagcccaggcctcggagcctcgggcctaccccagaagggagactgcccctgatcatctcatctgcctggacccagcagagagggggttccctgaagggcccatggtgcagctgccaggacagggcagggatgctggcaggtgagagccacagaagctcacagtggagccccgaggtgccctgacgtggcccagggtgcaagggggkcctcacaggctgtcttctctccttggagtccggggcttcctccgcagccctgtccacacctcttcctgcactgcagaccggttgtttctgccagggcgctggcgtctgaacctgcaacaggtcattcggcctctggcatgacatgggatggcttgatgacccacagctctgggcccagcaccacttgaggacgagtgtgcatgtctcaagttcagattttggagcatggccctccagggaccggctgcctccagcccagtctccccctatccagtcctctgtggctgggcagtggggggcctgggcccccctttcgtctaagcaagtgcagtttcagaaaagggttgtccccaaaactagcttattgcacccctcatggccagaagccactctccaactggtcacactgacccgggagagaaccattgcccccagagtcgggaccagaaggggaagctgggactcaggggtgagagcagctggcaagagcccccacctgtccagggggagctgagccgggcaaggacgggtctacctgcactccccagggctgccctgccctggcctttcactgacccacggtccagcgcggcctggcttcgtagtaccctgggcacctgctgcgtgagtgaggaaacctgcgtggcccactctgctctccagggcttctggggccttggagacaggtgagacccagtgacaagttccactctggcccacacacagctcctgcctcccagggcgagcagcactctgtgtctccactccttrtttggaaaatagggttaaggagggtcagccctgaccacagaggaagtggagagtcagggccacccaggccagctcctgttgccacagcagcctcgtcgagccaccagagtccggggagggttgctcagtgcccctcgtttgaaacagacaagcactggcctgctcgtcttcataataatcccatagcaaccagtaggaatggaaactgcgtttcttaaaactctgaaattctgaaggatactgatccatggctcacagctgtgctcgctgaacgtggacaatcatttgggggcttttaggccttttttttttttttttttttttttgagatggagtctcactctggtcacccaggctggattgcagtggtgtgatctcagctcactgcaacctccgtctcccaggttcaagcaattctcctgcctcagcctcccgagtagctgggactacaggctcccaccaccgtgcccagctaatttttgtatttctagtggagacggggtttcaccatattggccagtctggcctcaaactcctgacctcaggtgatctgcctgcctcagcctcccaaagtgctgggattacaggcatgagccaccacacccagccaggactttttttttgagacaaggtctggctctgtcacccaggctggagtgcagtagctcgatcacagctcactgcagcctcaaactactgggctcaagcaattttcctgcctcagcctcctgagtagctgggattatagccgcccatcaccacactcggctaattaatttgatcttcaatcactgataccctttcttccactagatcgaatcggctactgaagcttgtgcatgcgtcacgtagttctggtgccatggttttcagctccatcaggtcatctaaggtcttctctacactgttgattctagttagccattcgtctcatcttttttcaaggtttttagcttccttaccatggattcaaacatcttcctctagttcggagaagttggttattaccgactttctgaagcctacttctgtcagctcgtcagagtcattctctgtccagctttgttcccttgctggcgaggagctgcgatcctttggaggagaagaggtgctctggtttttagaattttcagcttttctgctctggtttctccccatctttgtggttttatctgcctttggtctttgatgctggtggcctaaagatggggttttggcgtagatgtcctttttgttgatgttgatgctattcctttctstttgttaattttccttataagagtcaggtccctcagctgcaggtctgttggagtttgctgaaggtccactccagaccctgtttgcctgggtatcaccagtggaggctgcagaacagcaamtattgcagaatagtaaatattgctgcctgatccttcttctggaagctttgtcccagaggggcacctgcctgtatgaggtgtcagtgggcccctactgggaagtatctcccagttaggctacacgggggtcagggacccacttgaggaggcaatgtgtccgttctcagagctcaaacactgtgccgggagaaccactgctctcttcagagctgtcagacggggacgtttaagtctgccgaagtttctgctgccttttgttcagctattccctgctcctagaggtggggtctacagaggcagcaggctttgcagagctgcggtgggctctgcccggttcgagcttccctgccgctttgtttacctactcaagcctcagcaatggcggacgcccctccccaggcaggctgccacctcgcaggtggatctcagactgctgtgctagcagtgagcaaggctccgtgggcatgagaccctccgagccaggcccgggatataatctcctggtgtgtcrttagctaagaccgttggaaaagcgcactatttgggcgggagtgtcctgattttccaggtgcagtctgtcacggcttcccttggctaggaaagggaaatcccccaacccctcgcacttcctgagtgaggcgatgccccaccctgcttcggctcaccctccatgggctgcactcactgtccaaccagtcccagtaggatgaaccaggcacctcagttggaaatgcagaaatcgccgtcttctgcgtcaatcacgctgggagctgcagcccggagctgttcctattcagccatgttggaacggaatccccacacccggctaattaaaaaaaaagktttttttagtgacagtgtctgtctgtgagacccaggttggtcttgacttcctgagctcaagcgatcctccctcctcagcctcccaaagtgttgggataacagacgtgaaccactggatccagcccttttaggacttttaagggagagaagaaaggtggttcctgcccgtggtgccctgtgggggttttagatgttcaatggtaacctgctcactctgcagggaggctgtccacacctgcttttcatagccaagaaaggcgcygataaataatgaaagaacagggtcagcagatgagagctggcccagcagcctgggacgctgtcctcagaaggcccacgtgtgggacgttgccctcggctggtcagaaggcacatgtgtgggaggtttttgccctcggctggcgtctgggaacaggaggtccccccgctgttcgctgataggagcagctcaccttgccacactgtttttgcacatgccacgatttatgcccagcatcctccttctgggcataaagagtctcggcacatgccaggcagaggcggccgcactgccagcctaggcaaaagccctgggaactgagtctcgcacagcttccccgtcagcatcccgcacctgtgctcgcagcccgagcgtcccgtgtggctccgcctggggagggttccacgctgcggctggtctccccggccccgcccgcaccttctcccctggctgatgccctccccgttgtaagtcatggcagtgagtaggactgtcgccaagacctgggactcctcccagcgagagtgctcccttgcggtatcttctgagtcagtggtgagcgtggagcccmctccctcaagccctgggactcctccccgcagtattttctggtgagtgatgagcgtggagcccactccctttacagcattttcygctgcatccattcatgttatttgtggcctggaacaggtaggaggatgacccaggtgagcacaagcagatccggacgcagctctgctgactgccgaccttctggggaggccagacccgcctcgggaagcctcaggacgcagcctgcagggagggtcgggcacatggcacccagtattcagatgtgcggcctcactcccagcccgaagggagcccagcagtggtcctgggcatgggcagacagtgtaacgggcgaaacatactgctccctcccatcccaggccttgtgcccccggcccacctgccattctgtactctcccacctggactggagacagcaggaagtgcagaagccacctgagaggatgaatctgcactcggggaggtggagggcaaggagctttgggcgtgtgtggccagtccccctcaggctggcctcagggagctgtaccgtcccagcctgcactgcaggtttctgctgcctcagtgggatgcacctcaccctgacatgggygcattcgcccactgtgactaggtgccactgagcccaaggtcccttctcagcccatgagcagctctgcgggcgtcctgccccctgtcctcccacctccctttcttcctcatcagcttcaggggacacctctctctaggtcctcctttcattccagcctccattgtcctcagaaaagccatttcagtgacttcaaaataaaccatctcagggctgggcgtggtggctcacacctgggatctcagcactttgggaggtggaggcgggtggactgcttgagctcagttcactcaagaccagcctgggmaacgtggcaaaactccatctctaccaaaaatacaaaaaagttggcctgacacggtggttcacacctgtaatcccagcactttgggaggctgaggcaggtggatcacctgaggtcagtattcaagaccagcctggccaacatggtgaaaccccatctctataaaaaaaatacaaaaattagatgagcttggtggtgggtgcctataattccagctactcaggaggctgaggcaggcgaattgcttgaacccaagagccggaggttgcagtgagccaagaccacgccactgcactccaacctgggtgacagagtgagactccatctcaaaaaataatgataataataattaactgggcatggtggcatgtgcctgtagtcccagctactcaggaggctgaggtgggaggatcacctgagcccggaaggcagaggttgcagtgagccaagatcgcgccactgtacttcagcctgtttgtcagagtgagaccctgtctcaaaaaaataaaccatctcaaaagggatccaaagctaaaagggccaaacagaattgtgtcccatgagacatggagggcctttgagaggaaaaagcccagacctggcccagctctgggactccacacgttaggaggggctgaggcraggagcggccaccctgccaagctgagccttacaggcaggggccatgtagcctgccgtccaccggggaaatggatcattgcatccagacaaagaccaaggtgtgaccacgcagacctggatgtccagccacccacgtgcgcccagagcggcccactgtcctcccgcggtccccggggcccagcgcccatccctccagcagccgttcccagtcagcacgctgccacccccgcccccggtgagggcttcccctctgttcagacccctgtcacttcacacaggccccgaggctgctgcttctttgacttaccaggacccagcgagtcaaacgcccaccggccccgacccagcagtgtcaggggagcccctggtccatctgcagaaaaccaggatgcccgcacttcctttttttttttttttcagacggagtctcactgtcacccaggctgtcctgcctcagcctcccgagtagctgggaccacaggcgcctgcaaccacgcctggctaattttttgtatttttggtagagacggggtttcactgtgttagcaaggatggtctcgatctcctgaccacctcgtgatccacctgcctcggcctcccaaagtgctgggattacaggcgtgaaccaccgcgcccggcctttcattcttttatagccgctttactgagacggaattcgctggtgaaagtgtgcgggtcatttttagtgtgttctcagagtcgtcctgccaccacacatcgtcacatcatctttgtcaccacggaaggaagccccagccctgatgggggtcactcccttgtgctccccgaagcccctggccgacccgctcccctttctgtctctaaggatctgccttttctgacgtgtccggtgaatggaatcttacggctcatgggccttgtgtctattttcccctcacacagggtttttgggcttcacacacacagcctgtgtgaggactccattccttttcgtggctgagtcatggtccacagtgtggagggaccacgtgtggctgaggcttccacccatggatgggcatccgggtgtttccagcttggctgccagggagcgagccgctgtgggtgttggttcatgcacaggtttccacgtggacacacttttcagttctgttgggcgtgtaccagggaggcgctgccrggcggcgtggccaccctgcgtggcgctgccggacctctcaccaggtgctgcgtgtcacgttcttacatggtgtgtgagggctccagtttccagtgagttcacttttaatgttttgttttgtttggtaaaaatcaaccttagacaatcagcgatcagactctagtccctgtcgtggtgaactgtggagagaccaaagtgagcctctctccggctcttggagcaccagggcccatgcagcctgtcttggggtcatttgaaatggtggaaactttacaagggcccgatgggsaggtgagccccactcggcctccaggcacagccctcctcaaggtccctgctgtccatgcaggtggcagtcctactctgtgggtgagtcctggagccacttgtgacaggaggaggctggatggggtgaatttggagaaaagtggcaggtttttgttttttatttttttgagacagggttctctgtctgttacctaggctggactgccgtggcgcgatctcagctcactgcagcctctgcctcctgagctcaggggattctcctgcctcagcctcccaagtagctgggattacaggtgygtgccaccatgcccagctgattttttgattttttatagagatggggtctcaccttgttgcccaggctggtcaacgagagagaaaagtatttcagagacttaaaaaaagaaccatcggtggtctccagtgtgcttaagagctgcgggtggagctgtttgcgttcctcctgaaggctttggctgccagacatggctgggctgcagatacttgctttactaagaggttttccctccctgccgtccaggtgtgtccacaggtgtccacacaaccaggtgtcgtgaatgtctgttcacactaagtgggcttctcagtaaccccctggccacacccccatctcacccatcccaggagcctcctgggaccacacacgggggtcgggagcttaaaagaacagaaacacggccgggcacagtgctcacacctgtaatcccagcactttgggaggccaaggcaggcagatcaccggaggtcaggagttcgagaccagcctggccaacatggcgaaaccccgtctctactaaaaatacaaaaactagctgagcatgatggagggcgcctataatcccagctacttgggaggctgaggcaggagtaatcgcttgaacccgagaggcaaaggttgccgtgagccgagatcgtgcaggcaaaggttgcagtgagtcgagattgtgccctccagcctgggcgacaacagcaagacttcgtctcaaaaaaaaaaaaaaaaaaaaaaaagccagaaacgcattctgtmtcggtctggaggccggaagtctgagctcaaggtgtgggcaggacctcgctccctcggaaacctgcaagggacctcttgcccctgcagcttctggtggcccccagccgtccggagcccatggctgtgtgtctcccgcctctgaccccattgccacacggccaccttcgccctgtctcctataaggactgcagtgtgtgggatgagggtccacccccatgttagtgacctcatcttactgaatcatatctgcggcaaccctgtttctaactaaggtcacatgctgagctacactggggccatgatttcagcataacttttggggatacagctccacccattaacacagatgaactgtgatttatttaaccaaatttctgttcccagtatctcaaccacaattttaaattggcataatgggttatacatagctgtaattattttcttaggataaactcctacaagtggaattgctgggccatgatctttttttgtttgtttgtttagtgagagtgtctcaccctgttgcccaggctggagtgctgtggtgtgatcatggctcacggcagcctcaacctcctggcctcaagtgatcctcctacctcagcctcctgagtagttgggaccacaggtacacaccaccacacttggctttttttttttttttagagttggagtcttgctgtgttgtccaggctggtctcgaactcctggctttaagtgatcctctcatgccctttttttttttttgagacggagtcttgctctgtcacccaggctggagtgcggtggcacaatctcggctcactgcaacctccgcctcccgggttgaagcgattctcctgcctcagcctcccaagtagctggtacaggtgcccgccaccatgcccagctaattcttgtgtttttagtagagactgggtttcatcatattggccaggctggtctcgaactcctaaccttgtgatccgcctacctcggcctcccaaagtactaggattacaggcgtgagccaccgcacccagccccatgattgccttttaagatagggtagctgcactttcactaagacagaggttggccaactccagcccatgggtcaaatgtgaaccacctgctgggttttgttgttgttgtggttttgggacggagtctccctctgttgcccaggctggagtgcagtggtacaatcttggctcactgcaacctccgcctcccaggttcaagcgattctcctgcyggctactgtactccgagtagccgggactacaggtgcccaccaccatgcctggctaattttttgtatttttagtagaggyggggtttcaccatgttagccaggatggtctcgatctcctgacctggtgatccgcccgcctcggcctcccacggtgctgggattacaggcgtgagccaccgagcccggcccaccacctgccgttttttaaacccataagccaggcatgggttttataattttaaattgttcaaaaaaccaaaagagtaatattttgtgacatgaaaaattatatgaaattcagatgttgatgaataaagttttattggcacagagcgtgcacatctgctcgcatgctggcttgtggcagggctgaggggctgtgacagccccatatggcccacaaagctgaaaggatttgctgtgaggccctttacataatgcatttgctgatgccagctctaaatatccatatttgcattcagattggtttcagaaataaatatgcgttgaatgcagctgggcctgtgaacgtggtggttgaattcagctgggcctgtgaacttggtcgttgtgtttagaatgtgttgtctttcccaggtgttgtgtgtttgtgctgccraagctgctgaaggcggcctgtagagggcaggggcccaggcaggcacagtcacttcactggtgtcttggttggtgcttggagcacctcaggagggaatatgtccttaaggaaggaagacaggccagacagaggggcctcggagtgttggcttctaccaggctcctgctgaggtgggcgctcagggagacggctggaggatccgaggagagccaaagcccyaggcggtgccctccccttctccttctagagcaaagtcctggcccactgcctgtttaaaagcacttttttccaacaatacacactgtaaaatttgaagaagttttcagtgaacaccgccgctgccactcacctccggagtttgccgtgggcatttgctgtgctggtgccatcacacctggcatcaccccggcctcctggcatcaccccagcctccgtgcttcctgccctgtgctcacccgtcctcctgcttggggtttttattgtaaaatacacagaacgtaaaattgaccatgacagccaccttaacgtgcaccactcgggcacagtccattcacagcgtggtgcctccatcccttctacctgcttccaaacagtccatcccaagaagaaaccggtactcatcagcaggccctccccagcacccacccccagccccggcagccactcagccgcctcctgcctctgcggaccggcctgttccggaggcttaatgagcaaatcacagcctgtgtggcccttgtgtctgcttccttccctcacatgaagctttccagggccgtgcgcggtgtggggtgcccttcctttcgatggttgggtagtgtgccgcggtacgtgcgtgagtttccygagacataacacgttaccacaggccaggtggcctyvgcggaaatggattcttgccggattctggaggccagaagtgcaaaatcaaggtgtcagccgggcccctccccctcaggctctccaggaaggtccttgctgtcccctggctggtggctgcgtcactccagtctcggcctcggccttcacccggcatctctactgcatgtctgcgtctctaagggcccagtcataggattgagggcccaccctggcccagcgtgacctcatcttagctcactacatctgcagagaccctacttccaaatgtggccacacccacgtagtacacgccggccgcactttgtcgtctgccgatgggcgctcagggtgctcctgccttttggccactgagtcgtgctgccctggacgctcgtatgcaggcctgcgtgtggacgtaagtttcagtctcttgggtgtacagctaggagtggagttgcagcgtggaactgcagggtcacacgataactgggcttctgggggacagttaccagttgactttgaaatctagacgtgtacagacatacgagggcctgtgtatttatgttgaaaatagatgcacgtgtttagaggccagctcctgcgagcatgcagatgctggtgtcaggctgggaggaggcagacggacacattccccacctgaagaccaagcagaagtggaggcgaaagacagcgtgggctgaccgtggagcggccccatcgtgcacgcacgcaggcgatgctgaggtttgggctggcgtggagcggccccatcgtgcacgcacgcaggcgatgctggggtttggccragctctgccgctggctgggacacagggtggtgctggcttccacggtccccgacacgctcttggcaccatgggcagctccccaggccagaagcacctgcagaaggcgctcattcctcctccccgtgctcttccctgcagatgggatggggtgacctcggggtgtatggagagccctccagagagaccccgaatttgraccggatggctgcagaaggghtgcttttcccaaacttctattctgccaaccstctgtgctyrccatgtaagtcagcggggccctygcccccaggaaggggtgagcccaacaggccgaggcctcccgggtccttccagccctgactctgggcggctgcatcaaccttgtctattcctactactgcagggagggtggcaggtgggctcaggcctttctcatcaaatcccagcccggctccgtgccatgtggggtgcggcacctgctgggttttcagggtcgaagttgcggtattgttggtggctgctgttctgtttcccagagtcgagtgctgtggccgcctggggagaggtgctgcagtgtggctccgtctcagggtacctgggaagcaggagtcccactccctccctccctggggagagtctctcctgctggagacagaaacatgtggtgttgatcgtgaggaagaggagaaggcagggcacggggctggtgctcgaggatgggggcgtgtggacctgcacgcccagtgggtgtcccaggagcctgcgaaaggaggcggggtcttggggacaacgctgagctgcagggcccaagggccacgcgtctttcagtggaatgggtgccgtgccccacccaggtggtggagacgctaacggggattgacaggcgtggcagccccttgtaaacctgcgcgtgcctcgtctgtcacgcgtctgtctactcgttggggctcttrttgacgcccggggtctgagccacacccttcttatccagtttctgtttctgtcacctccacatagcgagggcggcactgctcacaggacggctacccatccgcaatggcttctacaccaccaacgcccatgccagaaayggtaggctgcccaccgcctccagggacacccttggggtgcagggttgggcaggtgggctacgggtggtgcccgtgtctccgggactcgggtggcaagctgcaggtggggtaccgctggtgcctgggtctctgggacttaggtggaagtgcaggcccccctagctggcttccttccctgccctggcccagtggggactgagcggagggtgcccagtctggcctaaggagctgagccggcacccccaccccagaagctcccactccccaggcgggtgagccgcacacccacagggaggccggggctgtggcatcagcggcagttctggaatgttctggaatcgctgtgcttgaggggtttggatgggctccccaggggcatctcacaggggaagtgggatttccagtggcatttgaggaaagggaaggacgggggaggcaggggtggggcagtgcagcatcacgtggcatattccagagacccctggagaccaggcaggtgggaggctggcctgagaggcagggtggggcctgagggtgggcaggagtcccaaggaaggcgctggggggcacggagtctgccccgtccccaccctctggtgatggcactggctctgaggggtgcctggaaaaatcttgggaagtgccatgccctgtggacgcgcagcccccaggcacagcctttgaccccgaggggccagtgtcctgttaggatgtgtggacgcagcccccagtgtcctgttaggatggggttggtggcagcttctcggggtctcctcggggctcacccagcgctgctcttccagcctacacaccgyrggagwttgtgggcggcatcccagactcggagcagctcctgcyggagcttctgaagaaggccggctacgtcagsaagattgycrgcaagwggtaagtctcctggccacgcctgcccaggcgtcctgctccatccacttcctggccttggttccaagggacatggccacaagtttccaaatgaggagggtgtcttgggtgggaaacggcagctgattctgggtgtgttcaggtgtctccagcgtccctgtgcaggccagcgtgaccttgccagcaggatctcaggtcaccaggctggtcccacggccgcgagtatcctgcggcatcagactccgcaggcctgtcaccgtcatccctcgagtcacagcccctagcacccgccaccactgccccccggctgcctcctgccacgtcgtccttggaggggccacgtcattacacacaggagcygtggcggaggagctgcctgtccaccctaggggcctgttggatggtgaaagctctggtctaaaccacaaagaagccaccaggaaggagagtaacagcctagcagttgatgaaatcctgagctgatgagagcttgggtgctacacagcccccacgctgcggttttaggcgcacaggatgtttcatttcttttactccctgggacgcctgagtgagcctagagggttgggtaggagtcacctgtcccgaatttctctccacttgttggagcgttccccgcctgtcaggtccgcatgccgcctcctccaggaagcccttgctgctttcccagcctctgtgatccccagtcggctgcctgtggctcctgccggtccccttcagatggatgctccttggatgtagatggtcatggcagccaggaatttgctgagcttgatcactggatgaggaggacccagaggctgtctagggagcacttcatcattcttcagatgagaggaagcagcctgccgagctgagctctcagaaagcacagggcagagctgatgggcacagcagctgcagagtcctcacacagggaggttgggccccacgcagcctgcatagtccctgagccagtgccaggggccatggcggaagtcagcccccgagggccactggagcgcgtgagtactgtgccaacaggaggaagagccggtggcctctccaagtgacaagccccacagtgacccagagctctccgcctggcctggcagctctgtcttgggcccagcggcctcctatgcatggtcattggtgccggtggccagagctagacagggagtgggtctccatagaggcctcgaggctcctgaacagctgtcgacgggagagaggggaccccaaggagtgggagcaggagccaggcagacctcagagccccaggctcctcccgcacatggtgcagtggctggatggcccgggctgggtcctacagcggctgctcagtcaggtgggggggtccctatcccagcagggtcccctctcagggcagtaggggtgttgtcagccatgactcagacttccctgaggcccctcacctggactcaaaaagaggctgcttgatctgcatgaagccacgcgggtgtgcagggcagggacttgagtcccagagggccrcggacactccctgytccaggtcacctgctggtgagtgccaggccccactgctgctttcggacaaggacgttgagctgacagcttaatttgtgtagcgtcctgcccatgtgcttcccctgagcaaggcctttgtgctgcggacgtggaagcacgagtgtcccctgtggccgggcggtgacctgcggacgtkggcgcacgagtgtcccctgtggccgggcggtgacctgcggacgtgggcgcacgagtgtcccctgtggccgggcggtgacctgtggacgtgggcgcacgagtgtcccctgtggccgggcggtgaccagcggacgtgggcgcacgagtgtcccctgtggttgggcggtgacctgcggacgtggacgcacgagtgtcccctgtggctgggtggtgacctgcctggggtgttcagggatgtcggggtgctctagcaatgggcccaagtgctgaagacccaaaggaaacagcccggagttggcagccaagggagctctgaggtcacagagaggtccaggcgtgcttacctgagagaggagatggggagaggcagctcgggaggtccagggtacagaggccatgtccagggaggcagcagaaatctgctgtggtgaaatctgcctcggggaaatctgcgtcggggatgctgctttcaaagccgtagctgcwgmagaactttcctcagacgacacgcaactgacgtgagacccgcccacggccgtgcctagaagccatctcataccacctctcctgcagcccgttctgaagagcagccgcaagctggattcgttccaggacaggacaggcygcgcaaggaaacccggacagctggcctgggggccagggcgagtgggcacagaggtgtggcctgcagggctgctgtgggccggaggatgagattaggtgccaccagagggtgggagcacaaggtctgcgggggattgtcagaaggggagtgcgggacggggtctggaggggttcccacaggcctggggtgtgatgcctggcgatggccattcccagcaggtgaaccccggtcccaggagagcggttggtggaggtcaccagtgtggccacactgtcacgttctcttgtcgtcactctaatccctgcctctgccagggtcctggggatgtgggtacagctggcaggccccggggctcccgcacggcacacaacgccccgcccagtcgtcatcctggggccattgccctgaactgggagatgagactctgagcgcctcggtgtggagagacccagtaattacctggcaggaaatattttctgccctggaaaacccagaggagacacacttgggttcgaggcatgacccgcaaaactctcctgggagttcagaaaamgtggaaggaaggagccggggccacgaggggcatgtcaggcgggttccaggcggctgggaggctcctcacgatgcaccacccttcaccgtgcaggraaccccggccgccrccatgcctgccgccctcggttgtgcccagacgctctgcagggtaggcgggcagtgccagcaccctcctcgggtgaggycttggtcttttgtccctgccgtgcccaggcatngcccatactcagtgctggagggtgctcgtcttaccaagnattttgtgaaggtggtatctgttgctgctcagaacttccgagtgtccccacgtggggtccctgaagtgtcctgggttcctgtttccaggcatctgggtcacaggcccyagttccaccccctgaagcacrgatbtgatgagtggtttggatyccccaactgccastttrgaccttaygmcaacaaggccaggcccaacatccctgtgtacagggactgggrgatggttggcaggtaayggagycccaccccttcccctcccacgtcctgaactgctgtgcccggcgtgcctgccccccgcctctagcactggtgggctcaagtcgccactcatgagggctggtctgtccctgggtccccgggcaccragggctttggtttggtggcttctgtcccaccaagttttgccccagagcctatgagactcctgcctggggtttcccaccttttcagggtcgtagatccctktagctgtcctgagagaggaaggcccccagcagagcgagcccacacggtctgccctagctgtcagggtactgcccatgtggtctacgggtggggaggccggctgtgctccagacatccagggacatgggcaggacaggaggtgggatgaaacccccactgggagccacaccaggagcaaaagccgctgtccagacagagccgtcctggtgcccgggcgtgggggcagcacctcttgacacggyagtgccgggtccgggaccctcatcttttgtgaattttattttgcttaacttgactcttcttggcggaagtgctcattcattacatgacggtgaccagaagcagcaccagcttgctgcctctttctagatagagccccgtggaggtgtgggagtcgcaccacgcagcccccatttgaagtgtgcagttctgtggttggcattagtcacaggctgggacaaccagcactgtagctgcttcagaacgagccccatggcctgagcggcggctccccagccccagccgagtgaccacagccgcctcactgccttcaccttggtgtcgtgccctcagccccattcccccatcttcccatgtggcaggttattgcagcaccggcctcagccaggtcatcagatgcaagaccgtgccctgggggagcgagggatgcgtccagcttggttgttccctgagtggacatttcatttccaggcttccttttttttttttttcttgagacaggatcttgctctgtcacccagggtggattgcagtggcgcgatctcggctcactgcaacctccgcctcctgggttcaagcaattctcctgcctcagcctctcaagtagctgggattacaggcgtgcgccaccacgcccagctaatttttgtatttttagtagagacagagtttcaccatgttgcccaggctggtctcaaattcctgacctcatgatccaccttcctcagcctcmcaraatgctgggattacaggcatgagccatgacgcccagcccyagccttcttttaaatgaagcccatggctttgctggtgaaatcagggagaacgggactttcttggcctaaattctgaagtctgtctggatctgtgttcttttcagatattatgaagaatttcctattaatctgaagaygggggaagccaasctcacccagatctacctgcaggtgatggggaccgcaccatcctcgccctgtgggacgcatggggacggggaccgcaccaacctcatcctgtgggaggcgtggggacaggaangcatcaacctcaccccgtgggaggcatgggttcngggacctcatcancctcgccccgtgggacgcrtggggacggggaccgcaccatcctcgccccgtgggacgcgtggggacggggaccgcaccarcctygcccygtgggacgcgtggggacggggaccgcaccaacctcgccccrtgggacgtgtggggacggggaccgtgggaggcatgaggaggtcggcctgaggctggaggacgayrgtgtggctctctccataggaagccctggacttcattaagagacaggcacggcaccacccctttttcctctackgggstgtcgacgccacgcaygcacccgtctatgcctccaaacccttcttggrcaccagtcagcgagggyggtgagtcctggctccatggagyatagacctcgctggaggccccagctgtgcttgactccagagatgggacactcagtaccgtggcatttaggccaattatggaaaggccagagcaaycccacccctttgaagccrtccactggcctgggatcagcagaggagggctgtggtgggggtgctggctctgtccttcataagccacatgaacytgaackgaggccattcctcttctgggaagaggccggccagtttcactgtggtctgtgaagttatgatttaatgaactccgtgaatcacagtatgccgttggctgcctgatccatttgtcaccatcctccaggtatggagatgccttttgtcaccatcctgcaggtatggagacrccgtcmrggagattgatgacagcattgggaagatactggagctcctccaagacctgcacgtcgcggacaacaccttygtcktcttcacgtyggacaacggcgctgccctcatttycgcccccgaacaaggtgagtgctcgctgtcacttctcasggtttccccacagccascgtgtcagcgaagagtgcctggaccrgctgtgcccacggggtctgtggtgggcagagyatgaagggtccctctgggtccagcgggaggagcagatgtcaccgagcctcgagcaaggcccttctggcccaggactaacctggaagcaggagtgaccttgaacttgggggtggggaggaggtgacacaggggagagggtttgtcttggaagaggctgacgcctcccgaagggtgaccccggaggccggaggctttggaggccgcatggaaacagcagggccggtggagcagggtgtccctgctgaggtgggggccggcaccccagaccccgagcagccctgtgagtgtggcctggacctggtcacccaggggccgggctgcctccatgaagatggactcctgcccccaccacagccctgtcaagtggttcctgggatggagcttcagcctttcccccgctcggcactgatgaatgcctgacccatccccagcgccaacaaacctgaacccgcctcttcccagaccacgcgggggggggccctgcagcctcttcccagaccacacggggggggccctacagcctcttcccagaccacgctgaggggggccctgcagcctcttcccagaccacgcggtggggagagccctacagcctcttcccagaccacgctgaggggggccctgcagcctcttcccagaccacacggggggggccctacagcctcttcccagaccacgctgaggggggccctgcagcctcttcccagaccacgcgggggggccctgcagcctcttcccagaccacgcgggggggggccctgcagcctcttcccagaccacgtggtggggagagccctacagcctcgtcccagaccatgtcggggggcgcctacagcccagtgtgctgcggggattgggggcttcagagtttcaagtgatagaaaccagcacagctgaaagccaaaacagaagcataggctccctcgcgccacgtcccaccagatagctcccctgggtgagcctggctctcgtgcaggccctccggacagctccatctcccgcccactggagtcagacccacgagtcgaggcccccaacagacccatgtgtggagggctacaggcagctcccaggaggcagggtgctgggtggggggagggtggtgttggccgtcattccccatggggagcccgggggggcccacctcgacgccagcacccacaaccaccagccagcaggggcaagggtcccagcgacctgagtcttcatttctaaatgatggaatgtttcataccaacaaatggcatgtttcataccaacaaatggtatatgtacctatttgtaacaagatgagaacccacacacccagcacccagcacaagactagaaacagaacatcccagagaaagaaagcaggggagggggctgggcgtggtggctcacacctgtaatcccagcactttgggaggctgaggcgggtggatcacgaggtcaggaggtcgagaccatcctggctaacacggtgaaaccccatctctactgaaaaacaaaaaattagccaggcgtggtggcgggcacctgtagtcccagctgctgggcaggctaagtcaagagaatgacttgaacccgggaggcggagcttgcagtgagccgagatcgcaccactgcactccagcctgggcgacagagcgagactccatgtcaaaaaaaaaaaaaaaggggatgggagagagaaggaaagaaagggagggagggaaggagaagaagcacagcatggcctcctgtgagcctgagtgtcccctagaagtggccagtgtccccagctcagtgtccattgtcccttcacaggttctgtggctctgctgctgtgagcagggccctccctgagacaggccgggttgcgggtgttggcgtgtttgcccgtgaggggctctgagcagagctgcctgcgaggttccgttcagaggcttccccacgctgccgctcggggttggatggcagcgcaggaaggagctgcggtgactttgcctcccctggatggttcactttttcactgccggaaaaatattttctttttttttttttttttttttttgagaaggagtctcgctctgttgcccaggctggagtgcagtggcgcgatctcagctcactgtagccttgacctcctgggctccagcaatcctcccacctcagcctcctgagtagctgggactacaggacgtgccgccacacccagctaatttttgtatttttgtagagatggggtttagccgtggtctctctttggtagaaaccagtctaggctagtcttgaactcccgagttcaagcagtccccctgcttcggcctcccaaggtactgggatgacaggtatgagccaccgcagccggccccttcgtttcctttttcccttttattcaggggacccgaagctgagagagcctcaagtggctcaggctacagcagcaggggtggcttttgtccctgacgtgggccccccacccccttcttccatgtctgggagtgagccagggatggtgtagtcacctgagatggcctttgccccgtgaccacttcccacaagtgatggttcagaaaccaaaatccggtcttgggggcttgtcagaaacacagattcctacgccccaccgtgactgactgagtcagaaccatggggrggccagaagttggctgcattttaagtaccccaaacaccgggaggcttgtgaacattcacgttcgggaagcaccagtcggcagctgcgcacgtggcacccagggcctctgctgcgggagtgtacctctctgagtcttgctgacaccgtatggttgtgtttccatttcctcagtgggcatgatgtccccactttctccaggagactttgcagccgcggcatctcagatgagcccctggagagccaccccgaggctcggatcatgcactccagccagagtgccttggccgggccctttgtccctatgaccagtctcagtgactcagtggggagggagggggagggcctggggacatctggtcccagtggcctgacaagggcccctctctcccaggtkgcagcaacggcccctttctgtgtgggaagcagaccacgtttgaaggagggakgagggagcctgccctcgcatggtggccagggcacgtcactgcaggccaggtgagtcagcgtccaccggtctgccgggcagcaggtccaggcctgcagccatcccagggtgtgtgcgcccctcactggccacctcccccatgcaccccgtgctcatcctcaccgctctcctccccacgcaccctgtgctcagcctccacgcaccccatgctcagcctcaccaccctcctccccacgctccccgtgctcggcctcaccgctctcctccccacgcaccccgtgctcggcctcaccgctctcctccccacgcaccccgtgctcggcctcaccgctctcctccccacgcaccccgtgctcggcctcaccgctctcctccccacgcwccccgtgctcggcctcaccgctctcctccccacgctccccgtgctcggcctcaccgctctcctccccacgcaccccgtgctcggcctcaccgctctcctccccacgcaccccgtgctcggcctcaccgctctcctccccacgcaccccgtgctcggcctcaccgcyctcctccccacgcwccccgtgctcggcctcaccgctctcctccccacgcaccccgtgctcggcctcaccgctctcctccccacgcaccccgtgctcggcctcaccgctctcctccccacgcaccccgtgctcggcctcaccgctctcctccccacgctccccgtgctcggcctcaccgctctcctccccacgcaccccgtgctcggcctcaccgctctcctccccacgcaccccgtgctcggcctcaccgctctcctccccacgcaccccgtgctcggcctcaccgctctcctcggaaccaggtccctctcggtggctctcggtgtgtagggcttgctgtgcttggtcagacaggcaggaaggctctcggtggggactggagccacgtatactgccgtgtgtcacgtgggtgctggtaatgactgtgtggtgaggagacatccgtggtccagtcaccgcagcagtcctgagttaaatggagctaaacaggtttcttccctgcaggacttatcagtgcctttagcatgctggtgggcaccatgagcttctagaaggggcttagagcaggctgagtgtttaaaaacctgtctgtctactacagaatcggtcgttttttcccccaaagcacatcttctcaggccagtgtcctaaggacactcagagaacagcagcagcccgacacgagaccgttggtgtctgtctgccgcatggggtgcggacctcggtggtggcctgggtcctggctgggcgagggtgcgccctgccatctcagtgtgaccaccttcatgctgtcactgcatctcctctggcccaggaagctgcccctcggttgagaatcacaccgtgtggtcttctgtaacaggcacttgagccagacatacccatcaacacgcggggctgagtctggtgtttgtaaacgaccgctgtttcttcactgtttcttagtcttttgccctcccaatggcctccagaggcagccatccccttcaagtggccccacgaggatggggggggctcccagtggcagctggaacatcacacatgacgacagccagagtcaacatggggctcatggggctgagtgaagacgtgcgtggggccagctccttctggaggctccaggagatgttctgttccctgccttttcccaatcctagtagctgccccattcctgagctcctggcccctccmccgtcaaagccagcagcacgcaggcatctgtccctggccttcctgttccacgttttttttttttttttttttttttttgagatgaagtctcactctgttgcccaggctggagtgcagtagtgcaatctcggctcactgcaacttctacctcccagattcaagcgattctcctgcctcagcctcccgagtagctgggactacaggcatgctctaccatgcccggctaatttttgtatttttagtagagacggagtttcactatgttggccagtatggtctcaatctcctgacctcgtgatctgcccgcctcggcctccgaaagtgttgggattacaggcgtgagccaccgcgcccggcgcctgttccacttttgaggaccctgtggctgtgtcccaccccaccccctgctcacccaggctggcctccctgtttcgagcctcgctgatgagcggcctgcgttgtgtctgccgcctcaattgcctggcctggtcgcgcgcctgaaggcccagggattggctgctgttctgccagatcctcctcttccccactcattctacacatcaggaaactgaggccagagaggaagtcgtctgtcagggtcccccaattactagggagcagaggtgggagcaggcgcctggctgtggatcctgcactcctgcccaccatgcctgggcagtcccctgtgtccccagcagccagtgggactgggggcggcaactgccaagggcgcctgttctctacagctgtctgggcctccctcagaccctgcccagggcagcctttgtctgacatgggactcctgggccaccccaagttcccaggaccctgaaggtggaagagaccccacggttcactgaaaaggcagctgcggctccgtgtgaagggcagagtggctgtgagagtgaccgccttgttgtgcaggagaagcatgggtggtgggcacggcctcctttgtggtgtggggtgcccctaggacagaatgcagctgtgccgccccctccactcccctgagcgccatccccctgagggtagggatgggccatttggtttcttgtgtgggggcacctgcagggagtggccggtggtcactcagtgaacactgtgacgttggcatgagactcaggaactgtgtagctctgggagacgttggcatgagactcgggacccgcgtagctctgggagacgttggcatgagactcaggaactgtgtagctctgggagacgttggcatgagactcgggacccgtgtagctctgggagacgttggcgtgagactcgggacccgcgtaggtctgggagacgatggcgtgagacccgggacccgcgtaggtctgggagacgatggcatgagactcgggacctgcgtaggtctgggagatgtgaggttccccactgcagygggtgcccaccaggccgggacagggctggggctctgctccccaggctgggagccacccgtggctgtgctcagcagcagcctggaaaaggtgaggggagccaccccagcrccgcccggctccatgcgtagtgggttcagggacgtctgtaccccacagacctccccacccacctgcccacggaaaggctccagctgagaaaaatgccaatttcagcgttttggaaccttgccatctgcctcgctccctgargaagggaaaccctctccccacctgaggaagggaaaccctcttcccagagccaccaagttgccttttcccgtgggccacaaagtgaaattgaattcgatggcatcaggcctgtgcaccaggacaccacgacggggtttcagtgaaagcgcctgacgtctgtcccgacagttccctctgggcaggggaggctttagtccctgcagccctggattctgagtgaagtctcgaaagcgctgataacggtttcagtgacttctcccacagccgcagctgcccactgcatttctggatgtttctggaaggcatcgctgcctggagagttcttcgaaaacgctccacgaggaccctgcctgtgctgacaccactcccgcccgcccgccctgccggcaccacaagcactgctccgcagttattttttcagatgacaaaagcatctggatttctttcctttattattctgtcctttaaaggacacgggaaggacgggaagcagtcgcacagacactgctgaccagacctggggaagcttctcaccttctgcaaagcttcctgaactttcctggcaaacgctgagctttgcattccctgccccacactgggcgctgcagaccccacatcccgtgagcggctgcagcgcggagtgagtgtccctgtgaggccagggctcctctgttggagaagctggcgatcgccgtctgccctagcgaggagctggctgcaggcggcgagggtgcccctggaccgtggggagggctgtcgacactgggtgggagctccagggcctggcagcggatggcggtccctgcccagctgccccaggggctgagcttgccaggcaggggtgtctctccagccccaccccagtctccccgtcgagtgacccaagcctggagcccccgagttaagaaagagacagggccgccgggctcatgcctgtaatcccagcactttgggaggctgaggcgggcagatcacctgaggttgggagttcgagaccagcctgaccaacatggagaaaccccgtctctactaaaagtacaaaattagccgggcgtagtgacacatacctgtaatcccagcttctcgggagactgagtcaggagaatcacttgaacctggaaggcagaggttgtggtgagctgagatcgcaccactgcactccagcctgggtgacaagaacaaaactccatctcaaaaaacaaaaacaaaaaacaagaagcagacagggccactgagggaagccagatggcacgctctgctcatggctggtcagcagtgcccacgccctccggaggtcaaggcacggcgggaaagacagcctcctgcctgtcctggagctctctgggtgtgtcaggagccgtccccaccccagccactcggagctgctcctgtccagcctcagctgcccctccacatctggtttttctccacctgctcctctgacttaaggggcagggctcacagtggccttagggcattcagtgttagagcgaggctgatcctctccggacaggtgggcctggaggggcatctccctgggagggctgtgattctcctttcatctgatccacagaggcagagaagggtgccagggagtgagggcgtggcctggctctggggtctttgggcctggtttgaggctcctctgyctctcacaggccttgtgaccccgctcagtccctgctgtgggcgtgtgagcatgtatgcatatctgtagacccagctgggcagcggggctcacgcccccccagggattggcccccagccccatcgggtcggtgcagagtgccctgaccgtgttgctgccatgtgtttcaggtgagccacyagctgggcagcatcwtggacctcttcaccaccagcctggyccttgcgggcctgacgccgcccagcgacrgggccattgatggcctcaacctcctccccaccctcctgcagggccrgctgatggacaggttggtgctagacctgccccggccccttcccccgatccaagtagtgaagcccagagctgctaatcaggtgcaacccccaggcccagcagccctcctsgttctggacacaggcgtgctcgtgcccagggcaggaggaggcaggggtgcctgagacgagaggacctggggacctgcctgtggggcaggggccatcctgggagggtccaagcacagcgaggccctggctttcaagaaagccttaggagggagggcaaggccaggagaggggcctcatccctgcctgtacccgggcacatgccgcccctgcccgccccacccctgttccctgcctgtacccagacacacgccacccctgtccgccgcacccctgttccctgcctgtacccagacacacgccgcccctgtccgccccacccctgttccctgcctgcagcccgggcacatgccacccctgcctgccccacccctgttgcctgcctgtacctgggcacacgccgcccctgcccgccccacccctgttccctgtctgtagcccgggcacacgctgcccctgtctgccccacccctgttccctgcccagcctggtttttggtgcctcatggcttcctgtagcttccttcttccttccatccaagtcgctgctctgccaagtccatggcccagctcttaccttctgtccaaatccttagtgtccaaagtccatttcctaccccctgagagcagccaccattccactcaaaccacgtttcctgggtggtcctgaagggatgaggattccaaaggctcaacgggaagcaaggtggggacggcccaaggcagctgccgcctccggctatctggggccgggtagagggagttttgctcacttgtcccctctcgagacctggcacaagtggttggtcactgtggggagagacggtgcccagctgcgtcccccactccccgttcctgactcgcaggcccaacatggtcaggagaccccgtgccgcctgcttatcctcttgtctgcccaccctccccagggtctggcccagccttgccaaggaccagcaatgaggggacgcccaggcaccctagccccggccgcccaggcaccccagacacccaggcaccccagccccrgctgcccagaaaycccagccccagacatccaggcaccccagccccggccgcccagacacccaggtaccccagccctggccgcccaggcactccagccctagacacccaggcaccccagacacccagtcaccccagccctggccacccagacacccagccaccccagccccggttgcccagacaccccagccccagacacccaggcaccccagacacccagtcgccccggccacccaggcaccccagccccggctgcccaaacacccaggcaccccagccctggccacccagacaccccagccccagacacccaggcgccccagacacccaggcaccctagacacccagtcaccccagccccggccgcccaaacacccagtcaccccagccccggccgcccagacaccccagccccagacacccaggcgccccagatacccagtcaccccagccctggccacccaggagctccagccccggccgcccaggcaccccagccccagccaccttgcgggcctttttacttttcaatcatctttgtaaagtatcaaccaagacctcacgtggaggcatgagccactgatgacagacgcagcccagagcctccaggtggccccagcgtgtccttcctgtcattacatggtcctcccctcccatcccacaggcctatcttctattacygtggcgacacgctgatggcgkccaccsycgggcagcacaagrctcacttctggacctggaccmactcctsggagaacttcagacaggtacagggctcgggacgtgggcgcaggcrgagctgyccccatctctatccagacgtggcccctgagcaccgtcctgggggaggcacaggagggtgagacaggcaggaactccaccccctccacagccttctctgtgtggcccccagtcrttcagcgtggcctagggcatggcagctgacaggctggagaggagggagggacctcttcctgccccgcgtgatgacagtagccccgcggcatagctacaggcgtggcctagaccctggtcaggtggcccccatgggcctctccatcctgccagggcatctgagcctcccccacaccccaggctggaggcgacagagacgtggcctgcttggcccaggtgctacatgggggccgcagcattggcatcaccacagcaacccccagtgtgggagggtgaaacgccacacgcacagggcctggggctcctgccgccccaggctaccccagcattgtcagcgccaggctttctcccacgagccctcgcctcaagcctcctgctccctccccacggtcttttctggcccctgctgacccctacgctycagcatcccccagcccctcctgagaggtctctctcagccccacccactcccagcatcaaagtcttgagatatgaaccccctgctaatctgccttaattgggaagaaaatcatttagtgtaatggagagtctaaaractggaagtgagaactggggctgagggctgagcacccaggctgaggagggaagctgctcgtggggcagtgtctggagggcaatgatgcccaggagtgttttggctcctccccaccctgtgcaggccccgcacccgctcttctttcgggttttacccagcactgtcacctgcaagggccatcctgggcatcggtccccggcattgccgcctgtgagggccgtcctgggcatcggtccccggcattgccgcctgcgagggccgtcctgggcatcggtccccgggcattgccgcctgcgagggccgtcctgggcatcgttccccgggcattgccgcctgcgagggccgtcctgggcatcggtccccggcattgccgcctgcgagggccgtcctgggcatcggtccccggcattgccgcctgcgagggccgtcctgggcatcggtccccggcattgccgcctgygagggccgtcctgggcatcggtccccggcattgccgcctgcgagggccgtcctgggcatcggtccccggcattgccgcctgcgagggccgtcctgggcatcggtccccggcattgccgcctgcgagggccgtcctgggcacagtcctcggacgagccccttggcctgcagcacccgctctgggaatgttagaggcatacctcgcctttcccgaatcaggaggcccaggggcagcagaaagagaattgtggttactgtaaaatccttgcccttcttgagtgtgtgaatctgtgtcagctccctgggtctgtttttgttttctgtgttttctcttgcctttcacatgttggtcctgctcctccctgtcttagggtttctgtagggattctgagcgttgtggctctcccttctcccagggcagggcctcccttcccgtccctttccctcccctcccttccccagcagagagtaggctgttaaaaggggctttcctccatgaaattagtggcagtccagatctgaggctggctaaggtgttttaaatacactcacctgcctcgcaaagaagaggggtacatgaaaacagggtacgtgaggcatgccagctacgcatctcgggcccagagcgggtggcttcacctcctccacaggatgcttatgggcccgctagtccttcagcgtttagccagcgccctgcaccatgctgagtaccagggacgctgctaggcacaggcagacgagacccccccacggcccccagttaggggctccaggacacaggcagacaaggcccctcacggccgcagtcaggggctccaggacacgggcagacgaggcccctcacggccgcaggtcaggggctccaggacacaccttccctcttctcattgcagggcattgatttctgccctgrgcagaacgtttcaggggtcacaactcacaatctggaagaccacacgaagctgcccctgatcttccacctgggacgggacccaggggwgaggttccccctcaggtgagtcggtgcagggcctcctggctgctgaggcagtgccagccggactcccccaaatgcaggctccacagggacagagccctctgcaccctgcccgccgcctccccttgcctgcatctgctgttgctattcatacccacacgtgcttggtggcctgccctcctcccagggtgcctgctgctgcccaccctggtggtctccccacttctgccccttctgggccaccatccacctggcccccagtgatgtatcccctactctgagctgcatttggggatggctgaggccagaggggaggggtccaggccctggggcaagtaggaggtacaaggacacaggtcagctagcaggaggaatggcagaaagccaccagccccagctccaccctctgctctctgggccttgtcctcaccccaccgaggatgccggagtctgcgccatcacctgccagttttcagggaagccctccccttaccctcaggagtcttgagggtcatggtcgccagtaccagactcacctgctggcagctccttaggggcgacacagaggccccaacacttggctggagaccccgccctggcttcctttttttttgtccgaacccatctccctgggctagggctacctggaggcttccccccctcaccccagcaggatgagcaggtccccaattcctgctcctggcctgggggtcctggggcacgtgcatgcctagtggtctccagcattcctgccctatcgagttggtcctgggaagacccaggagcatcaggggagtggcgtgcagaggcagaaccaggcctgagcacagcggttgctccctgcccaggctttctatgctccccgatgggcctgggtttgagtagggccggtgggaggcagcagagagcagtacaggaccgagggtggcagcaccaccgccaaggtgccctgaggctcctgcaccctctggacggggcagccgccttcccacggggctgagcctgcggtgaggctcctgggctgcagcccctcagggatcccttgggcacttcctcggcagcacctctcctccaccgagcgtccagctcagaagcccaggatggtgactgcgggaaggcagcatggagcctggagtggacagcagtgtccccaggcccaggtccacccacacctcccagcttggcctgaagggaagtagggcctgtgccttgtgattaaggcacgggtggcgctgggtccaaggccaaatgccctgagtccagagggaggagacacagacatggtgaaggccacgggacgagacggggactggacagagcgccaccagcctcggctcacctggggccactggagctggaagaggcaggaaggagccccagttcctccaggggtgcacagccctgagacccttggtttcagcctctggcctctggaaaagtgaggggcatctgcagtttcattgttttaagccccagttcatggtcatatgttgtgggggtgccgagatacagagacagacgcccccgggggactcgtgatcacccatgggggtgagacccgtgaaaccatggggggcctggagcttggggccttgtggagctggaggggctgtctgggagccccctgtgcccgcagaagtcactgaggagccaacagcccccccagctggaagcgccgtcccagggggaccacggggagcagattgcaggccccagttacacagaacaagctgctggccacaccggtgcccgccacaccccccacaggctggtcgctccagggaccacccgaggttaaagcctggatggcggtgccccctcgcgtccactgggcgtgattggcatccacaggggggtcctcagggccactgctccccgcctgttgcgtttgctggagcccctccagccaggccagagcagagacacagtcccacccaccacagccacccagccccgccctcacagctggagaaggcagggttatttcaaagcaaacccaggcagcaggcagagcttcccagagggggtcacaaggaggcccagctgtcggccatgcctttgagaaccactgtccctgaggtcacacacccatgacacagcctgattcaccgtgggctgcttctcagacacagacacacatgtcactttgccaggagcctctctaaattaaagacgggtggccggtcgccatggttcatgcctgtaatcccagcactttgggaggctgaggtgagtggatcacctgaggtcaggagtttgagaccagcctggcctacatggtgaaatcccatctctaccaaaatacaaaaaattagctggatgtgttggtcggtgcctgtaatcccagctactcgagaaggtgaggcgggagaattgcttgaacccaggaggcggaggttgcagtgagctgagatcgcaccactgcactccagcctgggtgacagagcaagactccgtctaaagaaaaaaagacgacggggccaggcatggtcactcacacctgtgatcccagcactttgggaggccgaggtaggaggatctcttgagccccaggagtttgagaccagcctggtcaacacagcaagaccttactggtacagaaaataaaaaattaaggccgggcacagtggctcacacctgtaatcccagcactttgggaggccgaggcaggcagatcatgaggtcaggagttcgagaccagcctgaccaacatggtgaaaccccgtctctactaaaaatataaaaattagccaggcgtggtggcgggcgcctgtactcccagctactcaggaggctgaggcaggagaatcgcttgaaccagggaggcggaggttgcagtgagctgagatcatgccattgcactccagcctaggtgacagcgcgagactctctctcaaaaaataataattaaaattagccaggcacagtgatctatggtcccagctactcaagagactgaggcaggaagatcgcttgagcctggaaggtcaaggctgcagtgagctgctgtctcaccactccagcctgggtaacagagcaagatcctgtctctaaaaaataaatgaaataaacaagattaaagcaacaagccaggccacggccttcggggacgctcaccgtcagaaagtgcacgtgcagttcacgccagttctcaaccagcagtatttggccacagaatcctgcagaaacacaaatgcacctgagaccctcctggattaaaaatggaccctgtgctcaggggcgctgtgtgaagcccaggctgggaccaggacaggcatctccgcgggcaccaagcggggagccctgaaggaccccagctctcctgaaggtcgccctctgatgcaaccccaggcctgaggcctaagcagggagtgggtggatcgagcagaaagaggctggggcaggtggccgggggtggggaggggggcgcatccccgtccctgttgcatgcagcttccgtgtgaagcctcatttttagggaaggttctggagcaaaaagccagttctcacagactgctgagcgtccaaggcagaagactgggcttcagtgggtccgggctcacctcccagaaggtactgggcctggacaggtgctgccatcaggaggggagctgactcacctggtaaccccgtctctagctttgtaaggagctgccacaccaccttccagagtggctgctccggtccacgtccccaccagcagcaacgcagctcccagcctgggcattgagaaactccagcttcagccacactcgcagaagttcctccctgcatctcygctatggcagcgatggcaggtgtctttttatgtggatgttgtcgatattagaagtgattgaaaatggtgaaaaggcatcatctgtgcagatgtcctcagagcacrgcatgacggcgccgtggacccaagattcacagcatcgcaaactgcggccctracatcgcraaccgtggcacctcgtcgagccgtgtaatcgtatcttcgtgaagatgaaaggaatccaaacactccgcagcytgcattggaattttagaactgcagatgccgttcccctccatttcctgctttttggcaatgggatgacgttgcttttgtaatgaaagaaggstgtgtcatatttgtaaatgtttacgtagtagtgagtgctggggagacccacaggccccagcccacatatcccgggtcctggtcacaggcagrgacrggaygggacggctctactcacagcctctctgccagggyttggcctgctgagccttcatttcctctcttgcccgtgagtctgagggcagaggatggctcgggtgcctgctgcctgtcctagcgaggcccggggccgctgcaggcttgagcacrtggtcccagtgactgctcactgtggttctcagcccgttagagctctgcagcctcagcctgtccaggccagcccctctccgtccttcgctgtcagccccagccgtgtgaccagagctctctgtccccagctttgccagcgycgagtaccaggaggccctcagcaggatcacctcggtcgtcyagcagcaccaggargccttgktccccgcgcagccccagctcaacrtgtgcaactgggcggtcrtggtaagtggctggtgtgtgggcggccgtctctttgccrgggctgcagccacccacccggggcccaggatgaaccgtggccagcacagggcagaggcaggcgtgcttccccgcctccgtcagtggtgaggccctcgtgcctcagagcacacgcggcggcgtccgggattcgggaggcaggagccargcgaytcggggaccagaacaacgctgcaccagggcagccgcaggtccacagccggccacccgggcctctgcctggctgagctgagactggggagctccaaggcccctctcctgccccccacaagtcactgagggacagcagggcgcgtgagagggtccggggtcccctggtcctcgactcccacacgggcagcttctccttgcaggggccctgtgatgacctccaaactcccgggctctgaaggcaccgaggcaggaacggcactksccggtgggtcccgggtgggctggtgggcactgttgagtggcggcggccccagggcccacctgcgaggttctcatttgtgcctccttcatgctgggccagccccagagaccttcgcatcagacctgatctcactcataggcacccacccagagcagcacctccgtgcagcctgacaagaccaggccttgttcacctccagtagagaaacggcctcatcacgccagcatcggccagaaacacaagcacagacgtgcctccaaagtttcactgaagtctgtgttcaggccacaaaggatgcgtcgtcgtcttgtccagccctgggggccgcagcagtcagggcctctcaggagcagcttttctgtcccctgcttgggggtcccatagggtggcatgtggacggcccagccatcccgcgtgtgcagtggccgcaaaggcctgtttcccagcacagctgatgtgggtcccagcagggcaggtcttcacagctccttcagatgggacacgtgcggccctcgctctagtcggcaaaaacgagccacacacaggtctgcggtgtcgctcctgggtgcccagagcccaccgagcacagtggagatggccgagcccagcctcgaggcccctgggccgtcgctcacctgtttacacgggctgggcgtggctgcccacagcccctggatctgccgcgcaggattcgggaagaaggcccctcggcagctgcagacttcagcctgggctcctgctgtgcgggcgaaaaggcccagctgaagcctctttccagggccagacccggctgcagcgtgggagccgctgggtgcccgccgtgccgtgggaaggaaggtggtggctctgaacagccagggagccacagcgtgggccggcggatgtaacaggagagcaccggccatcgggagcacctmccagcagtgaggaccatggagggcagatggccttgtccctgcccagggacagtccaccctgcagggttatttaggactgggcagggcagggccacctccgttagttggggggcggggggcgggggtgcctggcaagtttcataggaagatattcagggcccttccttcaaagggacctgggcagctggcgtccccgcctctggactcagtggtggagcagggaggtccctgtctcaggacccctgagtctcggggccccaggagcccagggccaccagccgtggaggagccctggccttctgccttccacacccaatcccactccgtgctgctgggtccttctctacgacccaggctgcagtggctccacgggcgcaggccacacctgccatggagacagtgggcacagggcaggggaggtgggcgcacacagcctggctgccactgccatctcctgggcactgggggaactgcccccaccgccacacctgtgctctctgcagggggaaaagtgccaactcagacctggcgagctgagccactggggtctgaggggcccagatgccaccgtgagcagagccatgggggagatgcacagacacgcgtgtgaagcctgggggccctccttaccccttccctgccctctgtccccgccaactccaggccagccccaggagaggggctcagtggcgtctctggcacagaggagagggagtgtggccacctggacccctgcttctgggacagctgagcggcctttgagaaatgcagatcccccatccagactcamacacaccctgcggctgcctctgctgcccctggagtttgggagcagcttcctcacccaaacccactcctgctctggtggccaagggggcagggacactcatgcggcatccctgctgccgcctagggctggagactgtccttagtaccctgagcagcacccagaatccaaagtctgtcccyggaaagtgccctcaggsccatgcggcgtctgacgtggcacagaagtggcctggatggggacacagaaccaaactgcactcatttcagccaagaaggctcctcttagcggcataagtctccctttctgttgccaggaaaagtgccctcccatcaagcaaggcttccgctaagcaaggctgcactgtgaggtccacacacacccaggcgatggaggggtgcgggctccgctcagcaccgcactgaactgagcccagcagcgcagtagggactggcttctccctgggaaaggcttcttgagaggctgaagctgcaggagagggtgatgagttgagaagctcagggtgggccctcctgggaggaccgcctgccctttctaacactgctggccctcggaggccctcagccacttggcagctgcatcccccatacccgggacctccccrccaagttctcatttctccaatggcagccttcagagctgagaggccgagtcaagagggtgccatctcccaagttcccatgattcctggggagcgtctgtgtagctgcccacctggaccgaggtggtccccacactgaggccaattggttgggagtccrgggttgacctgggcaggggacacatcaaaactgctcgaggccaagcgcggtggctcacgcctataatcccagcactttgggaggccaaggcaggtggatcacctgaggtcagaagtttgagaccagcctggccaacttggggaacccttgtctctaccaaaaatacaaaaatggttgggcgtggtggctcacacctgtaatcccagcaccttgggaggccaaggcaggtggatcacgaggtcaggagttcaagaccagcctggtcaagatggtgaaactccgtctctactaaaaatacaaaaattagccaggcgtggtggcgcgtgcctgtaatcccagcagctactcactcaggaggctgaggcaggagaatctcttgaacccggaaggcagaggttgcagtgagccaagatcgcgccactgaactccagcctgggtgacagagtgagactgtctcagaacagcaacaacaaaatgcccgctgctgctgggtccagaagagcttgaataactscatgttctttttctcaattttcatttcccagaactgggcacctccgggctgtgaaaagttagggaagtgtctgacacctccagaatccattcccaagaagtgcctctggtcccactagcacctgcgcagactcaggccaggcctagaatctccrgttggccctgcaagtgcctggaggaaggatggctctggcctcggtcctcccccaaccctgcccaagccagacagacagcacctgcagacgcagggggactgcacaattccacctgcccaggacctgaccctggcgtgtgcttggccctcctcctcgcccacggcgcctcagatttcaggaccctcctsctcgccsacggcgcctcagacctcaggaccctgccgtctcacgcctttgtgaaccccaaatatctgagaccrgtctcagtttattttgccaaggttaaggatgcacctgtgacagcctcaggaggtcctgacaacaggtgccygaggtggctggggatacagtttgcctttatacatcttagggagacacaagatcagtatgtgtatggcgtacattggttcagtcagccttccactgaatacacgattgagtctggcccagtgaatccgcatttttatgtaaacagtaagggaacgggscaatcatataagcgtttgtctyaggggagccccagagggatgacttccagttccgtctgtcctttrtccacaaggaatttccctggrcgctaattatgagggaggcgtgtagcttcttatcattgtarctatgttatttagaaataaaacgggaggcaggtttgcctaattcccagsttgatttttctcttggctgagtgattttggggtccggagatttattttcctttcacaccttctcagcagctgccaagaatcaggtgcccagctcccgctgcctcccggccggcctcctccagaggccagcgccacattggttgttgaagggcaggactcggggctccttgctgttcccacgccagcccaacagcccgggttgaaggaagccacagggccaattctgtgttgaaccctccccaggcccctcctccagtacccccccaccccacgccttcccaggcccccctcgggccatctgggagacagaatcaggaacaaggaaggggaaggcggaggcctcctgggctggacgtggacggctgaagtgtagctcacacacttggaccggtggggccggctcatgtggcagcttccccggggacgtgaggatgtcagggtcctccatttccaccttccctaggggtctggagcccaggccccaggccttgccagccctgaccaccgcacactgcgaggcagccgcccctaccacgccccttggcatcagacgatgggtcccccacccgccctggaaccggggccccagcagccgcatgcagcctccggcctccccctccgaaggctcctgggggctgccttccactgagtgggttttcccttctgcagtaactgccaggccaaagctgaattgtaaaagttgcgaaatgatgggccgggcgcggtggctcacgcctgtaatcccggcactttgggaggccgaagcgggcagatcacggggtcaggagatcgagaccatcctggctaacacagtgaaactgcgtctctactaaaaatacaaaaaattagcagggcgtggtggcgggctcctgtagtcccagctactcgggaggctgaggcgggagaatggccggaacccaggaggtggagcttgcagtgagcccagatggcgccactgtgctccatcctgggcgacagagcgagagtccttctcaaaaaaaagttgcgaaatgaagaaaagtcttggaatagagcacaaggcattttagctctggggattttcttgaaaggaaattgtgtttggggggagttatgcctcacacaaccccctgggtaccagtcctcgggcggccagggggttcacagctccccaccccaaggctaaggggtcacctggcctctgcaggcggacagaagggcttctgccctcgcggatgcgcgccctggcctggccacaccttccggcctccctcccccgggtccgggcggggaagagccgcctcaacggcagggcccatccgcgagaggccagcgcccccggccggtccagcccaggcccgccgcctccgccctgggctgctccctccgggccctgcaccgccctcctgctacttggaccgcttcctcacgcccttctccaccccgcgcgccagcctcccgcgcgcagcgtggggatctcggccaataaaggagaaagggcgcggcccgtacgcgcgccaggtgcgtgggcgagaccagctcacgcccctcctccagccgccaaggccccggcccacagctgcctggctgcagtcagaagcgtagcccgagacaaggaagggcgccttgactcgcacttttgtccggttcgaacgttctgctcagtggtgcgtggaatgcgagcgcgtcttaaaatcgatggcgcctaggagtccatgaaatacggtacaggcttccggcgacggatgccccgcccctcacccacgctccgccctccggggatgccccacccctcgtggcggtcccgcccgtccccgcgcaggcgcgctcgggctgccgcwggctcttcgcacgcggccatggccgactccgagctgcagctggttgagcagcggatccgcagcttccccgacttccccaccccaggcgtggtattcaggtgcacgcacaggccgccctcgtggcgccccgacctgcgggcctacggatgggagcgcgtggcccgcgacctccgggcgggcggggcgggaaccctcgtctttcgcccccggggccctgccctccttcggccccggcgtcaccaggcctgtccttgggtccagggacatctcgcccgtcctgaaggaccccgcctccttccgcgccgccatcggcctcctggcgcgacacctgaaggcgacccacgggggccgcatcgactacatcgcaggcgagtgcccagtggccgcatctagggcscttccgcctctgcgcgcgccgagggcagcacgtgggctctgcgcgtctgcttgggggagggcctttggggtgcttcagggggcgccgggacgggcgccgtgcttgggtcgcccgggaagggttgtgagattgagcccccgaggccgccgcgctgtgcaggcgtccttcccgcaggttccgggtccccagcccaggacaggcgtgaccgagttgccgggtcagttggtctccctggagtgcccaagctgaatccacagggcccagctgccttgcttcttgttccttctgcgagctggtattgagcgcctgccacgagccaggccttccctggtgaagatcacggaatgcccacccagggaagggaggcctggaggcctccgggagagcccaagaggtggcccagggagaacagagtgttcctggccgtcttgcctctcctagggtgtgacagcccactccctggacactgccctgaggaaagcgccagctcttgctggagccacaacactgccagagctcccttctcacctcctgcaggaagccctccctgacctcctgccaggccggggcagggtttccctgagcgtcccccaaccatcacagctcaggccacctcgagagactccctttttagacagaagccctggtgcagagctgcctttgagagtaagctgaggcctgtcaggtttctaccagcccagttacagatgggctgctcagctcagagagaggggtggtgactcccctaggaacacacagctaagaagtggtcccttaaaagacagacccaggtctgcactctgacctggaagcagctccgggtaggtgatgggtaacattccttaaatggtgcatgtcactggcctttcagctgggagccaaccaggtaccccttgccaccggccaaccctggcccctggggattcccatgctgccgagtcactcctgtcacttaccctgacaggcctagwctcccgaggcttcctctttggcccctccctggcccaggagcttggactgggctgcgtgctcatchgaaagcgggggaagctgccaggccccactctgtgggcctcctattccctggagtacgggaaggtaagagggctggggtggccagaggaagggcagggccaggccaccgtggccactctcccccagttctaaaaggccttcccaggcgtgtcaagtggagctgctgtggttacagtggccttgggagctcagagaggttgagacataggctgggctcacacagccaggtaacagcaaggtggggttggagtcagggtctagggtggcagctgccaagctgtgcaacaaagctgttttctgcgggaggctgaggaccacacaccacttcccactccaggctgagcyggagattcagaaagacgccctggagccaggacagmgggtggtcgtcgtggatgatctgctggccactggtggtaagggtctccccgcagccaactgctgtggctccaagggcctggtgggagtgggacaggacctcgctgtgtgacatgggatgcagcttactgttgtccagagggtgcctggtggccaggccgacaccttcctctccccatgccttcccctccccaacccaggggctggcctggagcacctgctctctgcagcccaggccaactggggacctcaccctcccatccccaggaaccaygaacgctgcctgtgagctgctgggccgcctgcaggctgagktcctggagygcgtgagcctggtggagctgacctcgcttaagggcagggagaagctggcacctgtacccttcttctctctcctgcagtatgagtsaccacagggcctcccagcccaacatctccagctggatcccagggaaatatcagccttgggcaactgcagtgaccaggggcaccggctgcccacagggaacacattcctttgctggggttcagcgcctctcctggggctggaagtgccaaagcctggggcaaagctgtgtttcagccacactgaacccaattacacacagcgggagaacgcagtaaacagctttcccacaagagccgtctcctgtcctcctgttccccagggcagggagccccaggacaacaccagacttcagctgtactgtgggcatgtgctgcttggcgtgatgcccagcagaacctgtcctggttctcacctcaggagctagaaccctccaggcactgcaggaagaggccatgtgggcccatcttctaggggagcaagcgagggctcttctgcagatctagtggctgtaagcatgactttattagagtttaggaggtcagaaatactgaagtcaaggtgtgggcagaggccagtcccttctggaggctccagggatgtcctacttgtcctgcccagcttctccaggctgcctgtgtcggggcagggccgcgtcttcaaagctggctggctctggccctgtcatgaaggccctgtgatgacatggggcgtagctggacaattcaggatcacctctccagtcttgaaatttttttttttgagacggagtctcgctctgtcacccaggctggagtgcrtgcagtggtgcgatcttcgctcactgcaagctgtgcctcctgggttcacaccattctcctgcctcagcctccctagtagctgggacgacaggtgcccaccaccacacccggctaattttttgtatttttagtagagatggggtttcaccatgttcgccaggatggtctcgatctcttgacctcgtgatctgcccaccttggcctcccaaagtgctggggttacaggcgtgagccaccacacccaccccagtctttcttaatgacaaaagtcaccctttgctgtgggaggtcccatattcagaggttccaagattagaggggatggcctgccacccacactacccaaccccatattgccacagagcccccttcacccccagccacactcccgatggccccccagggggtgctggatctggcttcccttccccaccagcagcaaggacagaggtgcccacagaaaccggtttaatgtgaatccaccaggtgagccccatgaaggggcccaccgcccgcagccagagaccctcgggctgtgcagcctgcagcccacatctgcctctggccctcaggggcgctggggaaaggaaggccaaagtgtatcatgttcataaaagaaaatgctggtgggcccaggccagcgagcttctgaagcccacgtctgtccacagtggcccccaggctcacagcccctcctcagcacgtgtctggtggrccaggcgtgcagtgatgtgggcsaggtccgcggccttgtccagcttgacgtaggtgtcggtgcggatgcggtggaggctgagccagtccggcagcagctcggagaggagmagcaggtgcttctccatttcccctgggggaggagaggaggacactgaggctggtgctgggccccagccctgcacgggcagcacttgaaaccagcctgaccacccaacctctgtgcctgcctggtcgccctcagggccccatcaccaggacttagggcagaggtggttctgatcagaggcccaggtctgggtggtgtgaacagtgaccggagagagccaggcctacagttgaggccctgtgaggaggcaccgagcatggaggccgccagcccatgaaagccctgaggcaggaggtgccctgtagcgtcaggacccctatgtgctcagggcctggtcaccagaggcctgggaggcagtggagggtgcatgtggggccccttctgaccaaggactgcaggtggtcag

SEQ ID NO: 94260 - DNA, 42189 bp, Homo sapiens
aaaaaagctttgctaagtatctctctgtatataaagtgcttattcctatcccaatgaagacttcccacatttcatgcacccacccacctgcacctagattaagcaagcaatacaccatctgtacaacttcattccataattagtcttaattctgaccctgcagaggccactgatggccctcactattcctctaaaacctggaagccaaacaggctctgacatcttctgaggcacaactacccttcatgacactggatgtgctaacactgggaactgtactctctatctaccaaagcagtaagacaaaactgaatttataacttaaaaaccctctggaggcagtgggtcatgcctgtaatcccaactattcaggggactgaggcagtaggattgcttgaggccaggagttcagtaacatgctggggaatacaggctggtgtggatctcatctctacaaaggaaaattaaaaaataaactctttggctctacctagatatccatgtactatttcaaaatattgacccaactgctaagacaaaaaacatctagcaaaacactgatacaatcataaatatgtaaaatgatttttataaacgatcatcttgatttctctccaaaattcactgaccctaaacaaacttactaagccagagaaataggtcccaaaaccaggaacaaagaactcaaagaaattctatttgtctagcaactttcgaatattaaaaagcaataaatgactgtggagcagtagtaccaaaataattactaagggagctgtttcacagtgtgtcagacctttgacaactaaatgaggaccacaaacatttttactctcattctatgtacttcatgttacactctacattgttcactagtctaggtgaaacaatacatgaagtataaaggaatgttatttacaaaaaaacctttgaagtttttgcccattaatttcatcagatgctctgaaataatttgcatccctgggcacaaatttcatgccttccttcataatacccacagtatgtaacaattattagtaactcacgtaagtatggcaaaagatgcaaaacaagaacacaaaaatggaatgcaaaaggaaaacaacacatttacatggcagtttataaacaagcgaaggcccgagaaataaattttagcaactaaattcaattttttccataaaccaaagttggattaccttaccgacaaatcatgtacaaatgcttgtgaaacaggctttcttagaataaacccatttcgaatcactcagcacagttaaaaaacaaaaaattaaaatcttttgtatagaaaagccttttaaaaacccaagagatgtctttcacacagactcgaccctgattttgcacgaaatgggctgttgatttggcttaattttatcacacaccacacttgccacagtagttaagggaagacagaggcaggctaacaacaacaacaacaaatcacaaatacaacaatatatttcaatttgagagcaggtactgtttattaaccaaccagcttagaaaaataatcatggtagacacctgaaaggaaaaaagaaaaccattagaaaacactttaggcagctaacaattaacataaactaggcagttataaagtaatgattgagtttacatttttaagaccacccaatttccatctttaaagactccccaaaacaggcttttcctttcctccagaaaggtcctcaaaagcagtaaacaaaccaactgtaatcattaagatagttgacccccactccccacaaaagcactgattaaaattcaaacccccatcaatatttaatgggaaaagtattcaagattaccaccacttatactctaacattaactcaacctttctcaggatgaggtctctcaccttagttcattcttctaataagcctgttgatctggtcctccctgttgccagcatctccaccttctacaaaatgggtggtctttttcttcattccacctcgtggagaagacaatttgaagggccacaggaagttatttgcctctttgaagcgttttccaacagtatagatctcatgaatcaaatcctccatgcagatgatgccgtatttacctaaatattttaaggttatttaagattattaaagttgcaaaaagttttgaaataattattcaaaatctttttgaataggctgtgagataaaaacataaccaggaataaacaaggtaaatgcatggctttacaaagataaggttcaagctaatgaaaccatgtcttacgttttcttttaagctaaatcaagaatcatagggaacacatgaagattcacaatagtgagaaatgtacggccacaagagggtaagaaattatcgcatggtctaataccaaattttcccccaaatagaacctaccaagagatcgagcaatcaaagcgttatctgtcaaagcaattcgcttcttattgattttgccataaccacgcttgtagattagttcatttactgacttcagattggggtacctgaagtgaaaaagcaaacataaataaggtgaccactgttaaaacatctaaaattcatgttgctacataaccaatttatcaaatagaaatcaaaggagaaaagagacttacccccatgcaatatatggctctacaatcctcagcatgttaatcgaagccttgttgagcttcacaaaggttccattgaagatttgacgaaggcgaagaagctgcaacacctttcgaacctttgggctcactccattgatactgtggtgaaaacggaccagaaatgcatttgcctttcatcgaaatttttattaatactaaccattatagttttgaatatcgaatcctacctaaacagataggaatcctctcatgttacacactgaatttctgtattctattaagagaagggataggagcttggggaacatggcttgcaactaaaccattagtgatcagcaccctccttgttctagcttcccctaaaatattgttactccggtgtttcagaatcagggctcccagaagtaatgtgaaggtttttttttttttttcccattcaaacccgaatgcagtaaaactgaacttaccctctgattctgatgacaaacgccaatttgggttctgcaggtacatagaagttgccagcttttcttgccatcctcgccattcgaatttcagttctgtacatctgcctatattccttgtgatagtgctttgctttttcatagataagcttcctccttgcctttcgaagctgaaaaccaatwatcagttattcataatttttagctcaatcacaattagcaatgccaatcattaaaaagaaaactacaacatgtttcctttaaatcttttcttgccacagtatgcaattacatcccccaccaaaaaaccccactaccttcagattgtaacattagggagctaagcaattactcagtacagttaggaagtaaatcttgccaagaacattcacctcatcctcaatcccaataaggcgcctccttatgtgctagtgcctcaaaaagtttacttaccatcttttgggcaaacttctttctcaggcgcttgatcttcagctctgcgaaattccttcgctttttcttaagggtttctggcacagcaggaacctccttcttcttctctctaacgttaataaacaaaaatgttatcaatagctcaaaaagctcacagcgctgtattactcccgtactgagcagtgttgtttaccagaaatgctgtcactgactttagtcactagtaactttacttgctctggcatgctacagtgtacgatgcatattttagctccatgtcaataacctttaacaccatgttgcctaaaacgcaatcacaaatatgacaatagcaatacgtttttccctatttcaaccaagaggcccggcctccgacgactaattaaaaaaaaaaacaaaaaaaacacaccaacacccgaataacaaaatgtactagctgaaagactactgcaaggcactgaccccgagactttaagcgcaaaaattaaaaaataaaaataaaaaaaaaacaagccaccaccactctggttcaatcaggatccacatgttgaaagcaaaggcctggcggcagggaggcctgtaccaagcaccagccaaggacgaacacaattcagaggttctgcgcctcccccgaaagaccctctaccgaggactgggccgtcagccaaccgacgggttccacacacattccaacccgacatctcgttcccgggatctccaaaacctccgtcctaagaccgcccgcatcccaaccctagcctcaggtccccactggtgtcacacagcgttcacaatcaagcagggaggtgggcaaaggtgcaagctacggccagagagagaaaaagtgacacaaaaagtatctggctctggagatggagaaggattctcaagaggaccagaagcaactcactctacaccctccatggttccagccggaaaaagaggaagttggcgcatgcgtactgtccacttaaagacttcgcgagagaagccccacgactcataggtgtcttagaataagccggaaaagaatccagaactaaaaagccgccttgcagacgcaaagaactccctgatttagcctctttcaacaaactttcgggtaaaacttgtttgaagaaaatatatgcatttgattagactttttaatcaattcaagagcaaagagtgctgacaccttggcaactccgggtcctaatccccaggctgcgctgacaggattaggctccgttcctccccataatgttcccaggacgagcctcatggggacgaactacaaatcccagcatgcaccagtcttcgcccgcccggcgggagggcaacggctgaccaggaccgcaggcaagcaccgcggcgacggttccagccaggaaaatgagagcctcttgggccacgttccaaacggctagctgcaattcgaagtcacttttggccgccctcccggctccctgccgcggtagtcgcagactacacccctttcgccgctccgcgaggtccttgtcgtcgctccagcccacagggctgtcttccgcagcgcctgatcgcaggcggggcggtctggagtgctctagcttacgaaaagtggctagccagggaccagtggggaccggacggccggaggaggatggccggggctctgctgactgccgagctcggcargcggaggccaggacaccccacgggagggggcgtgagctgcgaagggaggtgcgaggagggctgaggttgcggccacggccgtgtgagaggggctacccggctcggctccgcggacggctggcgggctgggggctgggccggggggcggggtgcgcccgggggcggggaggccgggcggagggagggccgatgccgaggctggcgcgggctcttcccggtcgcggggttatatagcgcggagcgtggagcccgctcagagccggcccggagcgctctgacttgcaagcgggctgcgctgcggagcccagtgcccgagtgacacccgcggagagtgcagggccggggaacgcgagccctcgggggcagctgcaaggcgttgggcagcgcttgcctgcgccgagcgagtctccccttcccggcgctccgccgccccgcaccccactctcccaccctctcgcaacttgggtcgagttgacaactcccgcggcagcccgctggcccgtgccgcctccgctgcgcacccctcccccggggtgagagggagccggcgcgccggttccggggacgctcgggcggcagcagcttggccatgagggcagttcgagtagtctaactcgcggctgtcaccgccactgcagcggagccggccggccgggcgctgcgggacgggcgggcggctgccggcaggaggcgccgagccgggtgactgccgcggcgggcacagtccggggccacagcgccgagcccgggcgggagtggccccgcgcaggcagggagcggcgccgcgcactccaacccggcgggcacctcgggggcgggcgcggggcgcagccttctcgtcccggcctctgtgacaagcgccccggagccgggagcccgattgccgggctcggggtgggcgcggacgcaggcactgggctcgtgcggggccccgggcgtcgcgatgaacatcgtggtggagttcttcgtggtcactttcaaagtgctctgggcgttcgtgctggccgcggcgcgctggctggtgcggcccaaggagaagagcgtggcgggccaggtgtgcctcatcaccggcgccggcagcggcctgggccgcctcttcgcgctggagttcgcccggcgtcgggcgctgctggtgctgtgggacatcaacacgcaaagcaacgaggagacggctggcatggtgcgccacatctaccgcgacctggaggcggccgacgccgctgcgctgcaaggtaacctggacccgcgcgggagcattgttgggtcaagcctctttccaccccgcgccctaccacggcaggccccaaaccccgctgcctggtcagccccgctgtggaggaaaggaacaccccaccggtcttttgggagacgagtggaattcgcttcctgataaaggaacgcgatcacttctgtattaccagggagaaggtgccctgtcctcgcggaggttcggtctctggggaccacggcggggggagggggcgggtttcctaagccctccggggtagggaaggcggagggaacttgttaccacaggtttggatcccaaagaaatgtcttgctccgacttacaagcggcgcgatgggaaactgaagcgtctttgggaagttgttctgactagactgaagaagtgtctgtcttactgtggtctgaaccccttagacgagggcagtattgacggtttcattataagtttagcctgaggaacataattacattgtttcgccagcgataagtgctttagttacattccctgagcgtgattgaaagacgccttgcttcctaagagaaagctcttggaggatttaggcttcgttgtaaatttcttccatgtttttgrtcaccccagaaaatctgcatttctgaatacttattaactaacctgaatctgagttgtttttttttttaagccaaagcaaagtccataaccaaccataaatattggttcaggaaatttgataatggctgttggtttttaacaaaatttttcatttttagggaaaacatttacctgtacggagaaaattgacttgggcacttctcccctgtattgataatttatcatcaaacttattgatacctgcgtttttaatttaagggtgaaaatgtaccattttcattggtggtatggaggtgtagcaaatacagatttttgtgctccctgccgaaacctaaaagataagggtattcattttccaggataccgattttggtttttaaattgtcaagttcttatgcggtaaaattgcatatttacctgtaacttgatttgtgagagtacttcttagaggagtcagcccagttagaacaagccagtgatccctatttcttcattaaaaattgtggattcatttcttggctttggatgagttcagattattaattgcagttttgatttgtgagccttgaagtgagtttccattttgagggttctcatactaaagactaagagctgtttctcttgggccactgtttccccaaaaaaagaggagtgtgtagtgtgtgtgtgttgttctctgagctctgggctgagatcagttctttgcaggtgtctttagctccagcaagctgatcccatgtggtctacttgtattgggcttgtcacaattacatgactttcccctaagcaaagttatccagtaaattgctgtaattcccaaagacttcatgggaggmaggcagctgtaaagctcagtcgttggcaagccttgcagcgttagaaatttgaagctcactgtagtatttttgttttgtgtgatctttgtcctactgatsgccatgtgactcactttctgcacttccttctcttttgcatgttttctcctcatctggacttctgaggacagctgggaatggtgaggaagaaattctgccccactgtaacttgcaggtttttacctacacctgtgacgtggggaagagggagaacgtctacctgacggctgaaagagtccgcaaggaggttggcgaagtctcagtcctggtcaataatgctggtgtggtctctgggcatcaccttctggaatgtcctgatgagctcattgagagaaccatgatggtcaattgccatgcacacttctgggtaaatataaacatccttgttttctttgctgggccctccttaatgagaaggttgggaaggggagagacttcagtgccagcctgaaagcaacctgtactctttcgccacaaggtctccttagctcttccctatggtaaactgcagtgtatgctggttactgttagtcgttttgtccccgcccacccccccgccacccctaactcagtatttttgagagggcagaggattgaacattttgaactagtttgaaagattgccataaaaataacacgaaggagcgtaaaaccctgggtttgtttattttactttctgttgagtttataaaacattggttgttcttatgaatttctaaagtcaggatttaggcttccaaattactgctcagccacattttggaaagtgccaaagattctgaaatcaacatttgtggtctgttgggagtgcccaggccaccctggcagtyacttcgcatctcctgaccatccactgggtccagggcatcttcctgttgcaggacgcttcgggactctctcgggttagacagtgcctcgcaaatatcaccctaataggaccctagagagggaggcgaggtggtgaaacctggtaagctggggatttaaacaatgtccgcttctaaccattaaacaatgtcatgatctacggaggggagcagggccttctgctgctctaggggcaaaagtaaccccagtttttcatctcaacttgtcttcagtaaaggtaggtgtgactctgtcccctataactgcacactgctgacccactttatgctctttttcctcacagtattttccctttccttttgtagacagatacgattcaataaagaaggagtaaagaaataggattctactttttttttccataggcggattagccttctaatagaacacaasaaagaactgtttctcctaaataggtcacattaaacctcatyaattttttagcaactgcttaaaaacttaatctggcattaaaagtacttattcaaatgttgcacctcaagcatcaaaccttttctctgctcttggaggaagcttattttaatgttttatttttaaatatgaactttatttatttatttatttatttttcgagatggagtctcactctgtcacccaggctgaatgcagtggcgcgatcttggctcactgcaacctctgcctcccaagttcaagcaattttcctgcctcagcctcttgagtagctgggactacaggcacatgctgccacacctggctaattttttgtattttagtagagatggggtttcatggtgttgcccaggctggttgcgaactcctgagctcagkcagtccacccacctcagcccccaaagtgctggcgtgagccaccgcacctggcctgtttatttattttgagatggaattttggtcttgttgcccaggctggagtacaatggcgtgatctcagctcactgcaacctccacctcccaggttcaagcaattctcctgtctcagtctcccaagtagctgggattgcaggcatgcaccaccacgcccggctaattttgtatttttagtagaggcggggttgcaccatgttgatcaggctggtctcgaactcctgacctcaggtgatccgcccgcctcagtgtcccaaagtgctagggttacaggtgtaarccactgcacccggccaacatgaactttatttaattcatttacaaacctctagaaatgaatatataaatgacctgagcttatatatgttttaaacaagtaaggaaatcaccaaatacagtttgggcaacttcagcttgcctgtaggtgtgtgttgtgttcagtgggggtggggaactgaattaaagtccttgctgtggctgggtccccaggaacaggcagcaggtgtcaaaggggtggttagatgaataaaaggcagtccaaccaaataaacttgacatagaatttatcaagaatcttgtgtgtttatgactaatcctgagtaaaacaactaccatttgaaataaaagacatacataagtgggaggcgaagtgtcattttcatatttgaagaatggtaaagatgaagctgccgtaaaaactgcagttgatttaagtcagccctaaacagttacagcactatcagtaggttcattatgaaccgcagatactgactgggattgttttctcccgtaacctttgactaagatgatgcaagactacataactaaacttttacctacaccaggtattctaaagtttagccatcttgcctactttgtctgcatgattattttgcttaattgtaaaattttaagtgtaatcaggtttttaagaaaccccatacmatctgcagttaaatacttaaaacaagaaaccagctccaggaagacatctgataaaatgaatgctaatttagtgtgtgtaaagcacagaaaattcatagccttagctttgaaaatgcacataaattgatataccgtctttctaatattaggctactttttaacataaggaggaagtcaaatcaaatctctaaatagaaaaattattctggacctgaatctgtataccagggaggagcatagcaccttcctagagtcatcacygtgctttgagatgttgcttaaccacacaatttaaggagttcttggaagccttgatggtaatgacgtcactttgtattaaaatatgggaggctcctgaattctccagctgtttttcccctaagcatctaaacttaagaatttattttcaatattgagtcagaaaattcattttagagttggaatttctgacttcttgctgaaatttacaaatcttttgagaagttttgattcagcaaccaaaatttaaaggaaaattcagtatagattttacagtgaattttttaacaggggttaaggagtgtcacaagagccacctgaattcagcttcccttccagtagtcctcttatgcgaagcgttggtggcaacttttcaaagatgtgttgacgttggcatgtgctgttttccttctagaaaaaataatgagtgtgtctttttactgtatctgggtatggaaaagaagttaccccatacatttttaaaagtccatcagctgagcaaagaactgttcagtcatttgaacagatcatcctgaaccagacatttaagtaaccgttaatatctgttttcagcagttaatacctgtatttcaacaagtagtatgttgatcctgactcagagcaaaagtgagtgaaatagaaaaccatgtggacttccactgaaaagctgtgggcactcccaaaccagtccacatgctattccctctacctgaaacaccctcttcctccattccacgtgtcttttaaggtgtagctcaagtttcaatataacctttccttcccactgcagcacttctggcatttttggatattagagttgcaagaatccagagaccttcttgttcaaccctttgttttccagtgaagttggggttaaatgactcatctaaggtttttcttttctttccattaatctctcacagcatttgttatcattctcccaaagtagatggcaagctgtctgaaggcagtttattatatacatctttcattttcctttgcctggaacaaaactctattctttttttttttttttttttttgagacggagtctcgctctgtcgcccaggctggagtgcagtggcgcgatctcggctcactgcaagctccgcctcccaggttcacgccattctcctgcctcagcctcccgagtagctgggactacaggcgcccgctaccacgcctggctaattttttgtatttttagtagagacggggtttcaccgtgttagccaggatggtctcgatctcctgacctcgtgatccgccctcctcggcctcccaaagtgctcccattacaggcgtcccccaccgcgcccggccaaaactctattcttaagtcactcaataaatatttgataataataggcttaaatatttagaagataacctattcagagaatactcacatgggtctatgttctgaagttttaaaaggtaagcattatgggctgggcacggtggctcacacctgtaatcccagcactttggaaggccaaggcaggcggatcacttgatgtcaggagttcgagaccagcctggtcaacatggagaaaccctgtctctactaaaaatacaaaaaaagtagccagccgtggtggtgctagcctgtaatcccagctactcaggaggctgaggcaggagaattgtttgaacccgggaggccgaagttgcagtgagcagacatggcgccactgcactccagcctgggtgacagaacaatactccatctcaagaaagaaaaaggtgagcattatgttggactaaagctgtgtaagaccattattgcaaaccagggctgtctcacccttgttgtcactcatattttcttttgctttcctacataactttccattctccctgtcccacatgtgttctgatttttactattttgtgttagaactctgctcattggtgtgaggctagtgacttgataaggctggtgttggtatgccagtttgaatgaagctcacaatgaatgtgtaacagccattcatatttaccaatgatcagtcctcaaaaagaggacccccttggyaattctttccttccstcttaaccatgtaccatttctgtaccctttggaagcctttcctcagcctggcataattctgtacagccttccagtctgctgtgacrcttcatcttccaatgttgttccatcaccagtagctctcctaggaaccttctcctggtcaccagtcaagacttagtgatagatttggggtaggttctagtcagcataatctactgtgaaacaccmagtacaagaccatggaaaatgaatgcactatcatgcactttaacactagcatagaaattattcatgtgggctgtttgtatctgggtgagatgtaaaaacttgaaagatacctctcttgggcggggtgcagtgactcaagcctgtaatcccaacactttgggaggccgaggagggtggattgcttgaacccaggagttcaagaccagcgttggcaacatggcgaaaccctgtctctaccaaaatacaaaaattagctgggcgtggtggcacgtgcctgtagtcccagctcctcaggaggctgaggcaggaggctggcttgagcccaggggttgtagactgcaatgagctgagatcgcaacactgcactccagcttgggtgacgagagccagactctgtctcaaaaaaaggaaaagaaaaatatctctctgtattctactttgaaatatggaaagttggtctccatgcaaacccatgttttcctcaaagtactaacattgctttacttgttattttttaagagaagtagaatcttagcttgctatttctaaaagccaaagtttatctgtagatcctttttaaccgaagagctgcatttggcctttatacgtgagcagcaaattgatccctgattaaccaaaagggggaagcaaaagcatttaactccaggccttttatattctgaagaatttttgcatggtaaaggactaaatctgtcaaatagctagtaggtaatttacttctattgatatggtagtcagacaagataattggtagttaattaatagaccacttaacttaaaaggtttcacagttttaaaatactaattactgaattaagcatttatctrtatccaaatgtctaaagtctatttagttaaaatctatccaggaaaagtaaaagcccaccagctagatctgagtaatgtagcacttaaagacattagtgctgcagttgtacctaatatctcataaatggtccctaatcattaatgtttaggttcttatgtgatttactggtttttaatctcacatactgcattcctgtgttctctggttacagaaactagttttgttcaaggtttcttacatttagaatttcaaaaatcatttctaaagtattcataaaaatatttggccagtatttctccttaccataataactgtaagactaattagtttatagagaatattgatttcctatcttaagatagctactaaacacttggaattcatggcctatttttagaagtctccagtagaactggtttctgttattaaatatatgtcatatgtataaaaatgtttgaactttagaagtactttcaatgtcttaaacagagttgtaaattgacctggggtcaattttatcttattcttgtagtcacagttgaaaactgagtaaaacatctcttttgataggaactgcttggtacctgggactgaatacctatatacaccaaataggatcacatgctcattgaactttgagtttctgtatttgatacattacatgctgggcccaaatctgttgctactagaaatcaaaatctatgacatgataaaatatcactttacatagctggtgtgaatagggaaccagacgctgcatcagataaaaagttctccaacatcttcaatatgttctaatctgtgtctgtttttctcagttgtttaaaaaataactgctaaataaccaatgtcataatttctaacctaaatgaaaaaaacwgcaatgctcccctcattgccaaatccagtgtgcagcttcatctttctacagaatgtgaccctcttgaccgtctccttgaaactcaagtgctttagcttccatgataagcccactttgtcgtgcttctctgtctgccttcaactaccttgactgcgccacacattctcttaaagcagcatgtcacaaaactgaacaaactcctctttgctccttcttgcattccctggtcaccaggcttagaaacatcagcattatcttcacctctccagcctgcrtacattcatgggtccccaaatcctgactatttgcttgtgcccctgtgctttgattgatcgcccctttcctttcctacttcatcctgtgtgcctccatcacctcttgcctggactcttgaaagtgcctctgatcttcttttcctgtattcgcttttggctttccaacctagggtcatctaagcagccttgagtttgttatctgcctgcttaaaacacttgtatgaccatattgctcacagcgtgaagtccaggctcattagcatggcatcctgggccttccaaagctgatttccacctgcttttccaggtcagcacctatttatcccctcatctactgtaaacttcagatgggctggactcctcactgtgcctggagagagccttgcacacacttatgcttcacacaagagcctctgcttggctgttctgccatttgagtcctgttttacttgaagacaacagaagttgaatagttcagaaaaaaatccgtcactattcctgagaaagaaaaacaagttcaaaacattttcatgttcacttaataatatctttatatgttaagatggcagtccctgtaaaatagtcatgaaattcttggctcaaggaatggccctttcttgtttgatcatggagtgagttgtgytatttatctcaattcctggaaggaagcaaagttggtatttgttcttttctgcctcattatttctacatcccaggctttatccattttctgcccaaataaaatcaatctataggatatgtcaaagtggaagcattgtgtagcctgtgctaatgctaacactgactgaatagctttctcaaaaagactgaatgcagagtgccccggcagagcccttagccattcattgcaggattgggtcactacaaaccctgtagtttaatacttaactgctcacactccacttattctcttctcctacatttgtttttactctgatcatgcttcagatttttgagatctttgggaaattctaatgaatcggttttagtaacttgaatatatctaacccatgacaatctgagaaaatttaatagcctcacctgagagttagatgaattttaagtaggaaacccctttacatttaagttttgtcttgagttgagaaatattamtagcaaattcatctaaaatttctgctttagttctttcagaaactaaaattaagcctctttcaattatggtaagtagtctatttgcatgtgtctaatccagatgtctgcctatatggataaatgtgcagatgacatgctatgtttgtttgcttgcttgtttttctatgctcagtaataagtagaagacatgattatggtgcagttacagccactggacctgggaaagaaagtcctaaatacccaggatgtttttggacccccaaactgtactatgctgaagttccactagggggtgtactggcagggtggatttgtatcttatttcctgcacatagaaccagtattttcctgagagaaagggtcttttgtaactaatctttggagtatgacaaaatctaatagtccttaagaaatagagaactatttcctgcctcagctgaatgggttaagttcaatattttgagcctgtaactccagagatcagattaaaatatgttaatctttcttatcagaagttggtatagtagttagctattcaaagaactaacacttctagattctatcaactgacctagaagctcctttaggctgagaccccatatagacataattggaaaataactcagaagatgggggtttctgattttttctaaagcatacagctggtccccataataggtagccttcagaaggttccctgtattgtgaattatcattctgttaagataccattgttcagagcctaggctgacagagcatggccttgggattcatttgccttgacatacctggctggccagttccagtcacctgcatccctgggtttatacaggcctatgccatccccacactggagtggatgcgaggggacgcaaaccttttcatgtggtctgaaggaatgctaacattttttacttgaagagcttccccagtgtatttcattcttgaattttttttcttcttttttactttatttgtcaattctcttaaaactcaggttcacacctgtcagggaccattttcctaaatgctctgaaactgaaatgaagtgagccacagggggaaaaaatgaatatcctcttataatcttcataaaactttcaacactgcagcaaatgctgctagaatatttaacaagtaagggcaattactgccgcaaccttgagtgctgtcaaattagccccttacaatgacaagccacttacaatgaattcacatttggaaacaaaacattacttggtctgtgaaactttcaaagatcacacaaagatgtgtgaaagtggcagtggtgttagcattgtattttttggtttggaaaaaaccacaagtgtttcttacwtgctgcttgcataaaatgtgaatttcttgcctttccttcaaatagtttagtactggaatttttgaatattaacatggtgcagcttcttagtgttagmctaaacaatagggctcaaaataacataagtgktacttatgtaaacacatgggtattttgaggacaagtgaaacttaaaattcaaagcctgaattttcccaccttaagttgtaattaacatactgccccctactgatttcttaagggttttttacatgggctagtcctgcagtctcttgggaaagagaagcataaggtgtaatgaattacttctaaatgatttcatattgtatttttattatgtttgctggactctttaagtgttgcgatttttacttataacagtcgttttttgcctatagtaaaatgggactgataaaagaaggattagaaaggtggtggtgttggaaagtttcgttgttttccagcgtcatctaggacttgggatgaaagggactaggcagctgaagcaactgcttagcagtgtttttgcgacttcttttcttaggtcagatactgtgttttaaccagaatatggtctgcgtggagggcagggaggactaggagccatacatagtaagaaccaggacttgcaggaacttaaggaaacaacctaaccaaaaatagatagcacttataacaaaaatagtctataaatacatgcttaatgagccttgtgtactaaatttttatatagcacttaaatttacaaagccttttcataaacacttttctcatttgagcctcacagcaactctgaattaaatagagccactatcctcatgtttatggatgaggaaacaaacccagagaggtgaagggacttccctaaggtcactgccagggaaggaagaaactaggacccaaaccctcagcctaggcttccaggttagagcctgtacaaatacttagctgtgggctacaagttcaaagctcctggtacagtaggtagattttcctatgagtcacttaggagttttgccctgtggtgtagtgtaagaattaatcttcaaatgttgattttttattagcatggttagtttagcagtaactgattaaccctagcttaatatccccaggaagcttgctctgtagattagacaagcatgtaaaattcaagcctgaagaaccaatactatactagaattttattacgaaagcccaacttgcgtgtttctgggccttttctgtacttttccatagcttgtattggagagagttattatttccttgagaatagtgtagtgcatccttcgtcacccagcttccttctttctcttcctagtttgcatatcagcattgacaaattagacacaaaaaaagtcacgaatggatagggctcttctacaaggactggctgaacaaagttctatgaataattggtaccaaaatatcagttaagtgtggttttagtttagttcattttgttagcttatctcctaacaaaatgtaaaacctttattctgttatataatattcttatgggatcagaattccagatagcttcataagctttgcctttgaaatgttaatcatggattttcaaaattgtgcactttgggccactggtagtgtccaaacttatagtccaagcatgtgatctataaaggggtaattattccctaaatgaggttttctcacaggcttaccatagtataaaagcctctatggttcacttgtccaaggtaaagttggaaagccagtgaggtaagtgccaaggctgayggagtctacagtccctgtcttgaaagctaagccttcaaagcctctgtggatgcagagggaaggatttgaagtcttttaggtttcttctttacaaactttgttctaatgggattgggtggcttgctagtgctaaaaatggatmcaaggtaaatagacatagagtcagtccacaaagtcccatggtcattcatactaggggctcttgcactaggggctcttggcattgatttgaaccaggctttacctgataaatgctaggggtaggaggcactgggaacagaaagaggatcaattatattgcctgtttcactgaactcttaggagagttgatctgaagccacgtgaggttgggagtagacagattgctcaggctcactctagaaccttcttctcggcttgtagtcccgagcagccacagcagcaccacctaactactgaatctgagtctgcatttgattcagagcccaggtgattcctacacgcatgtgcgccaaagtttgaagaggaactactcttcccactttttcaatattccatctcccccttacccacatacacacactttttttttcctgagctaaccagccctttaggaatcttgtacctaggaagatgtcagaccacgcactctggggcccactctgatctaggtttattttttaaattttgattcaggtccagtgtctgaatggttgctctgcccagggtggagttttcacagccctaagcaccacagcagaaagtcagggccggccagtgaagaactgtgtggcattgctggataatggaaggaatggtgtctcatgtatatttgttgtccttaaaaggaagttttcttttttcagttctcataatttagtaatgatattttcggtggtttaaccagagttgtgattggtaagtgattggtgtgatcttctatgacatttcaatattgttcctctgtgaggtagctagaatatatcagacttgttggatcagtattattgtccttcaaaggtacttcttaatttcatggtggagtggtggtttgaagtatagaaactaaaagtgatgaagttttgagtccatatttaagttgttgccttttttttttttttttcaatttccagccccaaatatattccaaacctggaaaatgtcattacaatatgagaatgaaaacttaagggacaatcatcactggagtatacgggacttcctttcctaatgtacatgttctttctagtgagtagttctcatgtgggtgattttgcccccaggaaacattggtaacatctggagacatttttcttgtcagactggtggagctgctgctggcatctagtggagagaggtcagggatgctgcttcaacatccttccatgcatagggcaatcctatggcttaaaattacccagccccaaatgtaatggtgctgagattgagaaacgctgttctagagcactggttcccaaactcagctacaaatgggaaccacctgagggacgttgcctcctgatgcctgattctcccattggagattctggtataattggtctgagaggtgtcctgaacaccaggaggaaaagcttcccaggtgattctaatgtaccaaaccactgatttataggaaagttgccatctgcaatctttaaaatcctttaagaggttcacaaatacttatttttgttttttaacaatgcctatcccaatgtaggtacctcatagaccctcatatgtgttgagtgaattctaagttctaacagtgcatgtttaaaaacagaataagttttcaggtgtaatctcttgaatatatttacccttcatttatgtaaagattttaactttttaaagatttcacagtaagcaaactagaaagcagggaagaatttgaactatttacacttaggaattacaggggttgatgatgatggggacattgagagctgtgctgttggaacaggggctaagaagtctgccactgcagatggccggagcagtggctaagctcgcatgcatgtgtttatgcrtcatggaagtagttactggtcactagagcagaaccgaagcctctgccctttggaagatctgtctttattacaatttctgagaagcagtttgagtttggggcaaagcaaagagatcaatgacagcctgttgtttggcaagctatttggctgcaattttgtgggttattttcattattccataaagagttattaaatagggggaggggcctgaggctgaaggagatcatcgaacactcgtttgatcatctagggcccggcaggggaaagatgagggaaaacagcatttcagaaacactgttcagcattcattgtttaacacattgagcctccatggactcaagtaaaacggaagaaggatgattgtttcaaataatttgtaatttttttaatagataagaggcatacattcaagttacattatgttaaaaggcacagccgtgacatcatagaaatactcaatgagatatttttgctgatcactcaatgctggccactgcactaatggagttgatcccttattgagtcatttacgagagtcttaggcaaataatacctcagcgtgacctcagtattcggggtgtgtggtaggaattggaaaaataattgttgaatctaaatcgtaacatatttgagatgaaaaaactttggacatctcctcttgtctcacaaatgagtttagtcaagatccagagaggtcaagtaacaaaaggaaggtcaagtaattggcagtcaggaccaagtgggtttctggattccaaaggccagtgtattttacagacaaattgagttttaagtcaccttatttctggtatttctgcatagtgagctctaaaatgtaagggaacgttaatatctgagttgctgccttgaggtaaattcatcctatcctttaacagygggaagacaagttaatgaagcatttatttttgctgaataactaatggtgtcatcatcgaggtgttcatttgaaaagcctggctcttttattagcttcttggttgcagggcaactgtaggagtattcttgtgcatgtgtgttaagtactaactgctgattctgttcaaatgttgcactaatccctgcggcctcacaataatacatgtttttaaagggatagatttaacattggcacaaatttgactattatgacatgttctttagtctctcctctattatctaaagagtgaatgttttgtcccaatctgatagaaattaagatgaacattttgttaagtctgagagagtagttccaggcttaagtatcttggggctctattgcacaattggtcaggggacctttctgtctctacaaacatacccaactaggaaaaagaggctattatgcaacaacatatgcatgttagaatttctgttgtcagctgcaactagaatatttaaagttggcattgctagtaaatacagatttaggttttacttcctaattaaatatgtaattttgtaatgaagatttttttttcaaataatactttctgtggtcgaagtaaaatgtctaaagtttggtcagtatacttaataagtagatacctttagaggtactttagccatattttccttacccaggtgagctgatagtatgtcaccattttacattttttaacacactaatgatgtatcctattaactttaacacagttcactatattttaagcaccttcaggcattataggaggtatggtcccctgtggaagtcaatgtctactctttcttggatgttcaaataaaagataaacacttcaaaaccattcttataaaagatggcttttttgaattgatcacaggacaatgaataaaacattgtgaggctacagggactagcggaacatttgagcaacatcagcagttagtacttaacacacacgcacaagaatactcctacagttgccctgcaaaagtttgtgcttttgcatcattttccaggaacagtgactgagttctcagagaagagcgccaccagatgtcattttagccttgtaaataagcaggagagtgttcctttgtgattctgataaagataagttaactctggcagctgcacaggcagaaggggtggaacagtagaggaaagttgcccaaccatgtgaagggtgccgtaagcatttccagtcagacsttctttgttcagtggagtcttgatggtgttcttttttattcaaagtttacatcatgctattatttggagattctgaaaatccttaagcatacgtgagaaaactgtgctgtgctggtggtgttgacctttctcccagcgttatatgatttatggtcctstttggaaatgaatgtctactctttcttggatttcaaataagagataaacatttcaaaacgattcttttaaaagatgccttttcttgatcayaggacagtcgtgtatgtgcacaaaaataataaggccttctcctacggtgagaaattaactttgcttttctctcagtgctcaggaacctagaattgcttacaaatatggaaaacacattctgttgtacctacacctttaaaatgtcatcaatctcagaatttcaaaagtcagaccttgccggataccacatttcttcacattgacttttgttccactttaggctaatttgtcctgacactgcagctgcaggctttgggctgcacagtctrtcattaagagtaccaagaatggtctggagagtcggagctgttggaagttaatttggcgtaaactttactttaaaagatttctcgagctatgacatgtcacgtctatgtgcagttacttacatgtctgtttaagaagttcttgcttatattacaaatgtgacctttacagttatctttcaaagtgcccagtgctttgaagaggaaccctgaggagctaaggagatattagacttgttaagcatgtttcataggaatgtcagtgtccatttgaatgtccttccctttttttttttaatcacacagcaaccctgtcagctggtagcagattatggtattggaatcttgtgatcaaattaatcatggtagtcaaagttctagctctacatttaatagccaaagtcagttattaaaagttttctcttttgcaaataagaaaatccctaggccccttccaactctaaattctgtaaacttcctgtttcatatattggttactgactttgagaccccctagatcaagagtcaaccatattttcctgctgaagaacttgatgtcctcttctgttttttagacagtaaagaggacactgcaatagagtgcaattctctgacttacatttagcatctagcaaaccttgccaaccagcatgggcaccagctcactctggagactgagcacatgtactgcatttagagacccctttactagatgataactcctgatctatccatccttatacttgatgtaacacagcagtcctattggtcagcaaattatctgtgctgccctctcagatccacccatgcgtcacaggcattaatctataccaaagccgtttggctgtgtgtttcagatttgccctttatgttcttctgacgactctttgagacaaagttaaagattatgaaccttagcttgaactgactggtgtcatggcaactagcacttcaccttttgctggtctctatctcatacatgctacaatatttgtgcacattaataattcattgcaaagtgccagatttctttgtgctgtcaagcagtgtcaaggacagaatatgctgtgctatctcaaatgtcatctaccagactgttgagggcaagagtaattagaaaagaaaactagtcaggttacttgggaaaattcctgaaaatgtgatgctttctagtcacccaactatagcatttttcttgcaaagtatggaatagaattcatgttgatcaaagtttatttaataatgcgccccagacataaggcaggagtttggagtaattgctcgcctctattcaggcagcaaaggaaatgattaacagccttcgtgctcagtcacgtgtactgggctccagcgggaacctgagcacaggcttaaaagaaacccgagtggtcctgatgtgggtgctcctaccccaagcctgcctttgcccgacacagagcagagctgagtaaatgtttgacaccagctttagaaacaagccgtctgggatctcaggctgattagcggccctggatagctttcttcacctctcagttccctccgcgcagctctttggtggttgttgacgctgtgagtgattgttatagtaattgcagtgttgcctgtaattaatgagcctttcaaataaaaaatatggatctttgtcttaaaaatgtggaaaatgcaaagatacattggatttaatttatacagaaggccagatttgtccttgattaggcaaagaaatcacatgttttaaactgaacattgactcacctgtgctttacagaacaaaacaaataatctccctctcaaaagaaagcttcatattacaaccagccagcatgtgtcgtactttactctttaaaattggaatatatttctccaaatgtttatagcccacagttggaaaagatttttttcacatagccatatctggattgtttggtttctctttctctctcccttcctctccccaccggcctcctctctctctctctccccccaccggcctcctctctctctctctccccccaccggcctcctctctctctctctccccccaccggcctcctctctctctctctccccccaccggcctcctctctctctctctccccccaccggcctcctctctctctctctccccccaccggcctcctctctctctccccctcgcccttttttgcttccttttcctttaaaccactagcttaactcctcttcagacaatttgggggtggggggagggtcccacaggtggaagtgtgtccccacgtcacattttttagaatatgcagccatactaccctccttatggacaaactggaactattttatttaatttaataccaccagtattcatttcagggcaagcaaggggaggggatattaatcagtttcagaacgttgcaacaaattacacttaaagaacagttaggaacttgttaatcttctgtcacctaccttgatgtggtgctggggatctggattagtcatttaatacctgcaggcaagaccagagcacgtgaatacagggaagtcattacagccaacctgctatggtgtctgagtttctagtcagagccagccgctggctggagttagagtggacacgtgagtgagtgattcagatttgtcaggtaaccaagtagcaggttctgataggaatttgatattggatgtaatttcttaggatttaatattgagtccttatactttaacttttayacagaaagataactaagaccctttatgttaagtttattgctgtcttccaagactaggcaaattttcaaaacttaaaaatgatctctggttaacgtcaataatatgttttatactttttggctaatctgggaacaattaatcataactagatacttttaaaagacatataggcttgattacttagggatatgttttctagttgtttgaggcagggtctcgctctgtcgcctaggctggggtgccataacacaatcacggctcactgtagcctcgacctcctgggctcaagcgatctgtctaccccagcctcccaagtagttgagactacaggcacacaccactatgcccggctaattttttgtattttttgtagaggcagcgtttcacagtgtttcctagggtgstcttgaactcctgggctcaagtgatcctcccgccttaacctcccccaaagcttggggattacaagtgtgagccactgtgcccagctgttttctagtttagattggaatatataaattccattgtgatgttactttatttcaattctgtgatataatacccatgtataaattatagagcctaaagttgaacccataataacctgaagtaccagtttttgactttttctggtaacagatcaaaataataattactgtcataattactctttctgtttttactactacaaagaaatacaatcaagctgaaacatgtgtctctcttcctcagcagtgtacttgggcaatgcagtaatgagaagtgtgttcacttgctgtattagtctgttctcatactgccatacagaaatacgtgagactgggtaatttacaaagaaaagaagtctaattggctcacggttctgcaggctgtacaggaagcatagaggcttctactccatttctggggaagactcagggagctttcagtcatggtagaaggcaaagagggtgcagcaataaacacggcagaagcaggaggaagcgagggggtgggggctgcacacgtttaaacaacccgatctcgcaagaactcactcatcactagagcagcaccaggagatggtgctgaaccatacatgaaaaatcactcccatgatccagtcacctcccaccaggccatacctctgacattgaggattatagttgacctgagatttgggtgggggcacagatccaaaccgtatcactagctctcctccacagtgcctgtctcagtgtagcaaggtaattctcccttaatatttggaagattgatctgggtcttccagcttagtctgggacagtcagacaaataagtataagacaatcaaaatcaaagcactataaaacacataatcgcattaaggtaaatggtactgactataggtcttagagaaatgtagacaaagtcaggctggcctagaataatattagataaaggtttaacaccctaactaccttcagtaaagaattattagggggctccagtgacataaagcgctttgaaaagcatgagagactatataaatatgtgatgaatattacactttgatttacacacgaagggtctgggatagattatcagaagagttcatgggtcaaatgccacaggtgagaataagcatttcatgggtactgatgaggaaactcaaacagggtgtgagttgggagtggggtactacatgatgactggggaagaccttgggatacttcacaaaaattcatgtggcacctgtatgaataattggtgggagcacagaaaaacatcagaattaagggaattgctgttttcaatctttacacacaaaaattataacaaattagataaggccaagggcagtggctcacgcctgtaatcccagcactttaggaggccgagatgggaggatcacttgagcccaggagttcaagactggcctgggcaacataatgagaccccttctctacaaaaaattaaaaattagctgggcatggtgacgtgcgcctgtagtcccagctactcggcaggctgaggcagaaggatcacttgagcccaggagttcgaggctgcagtgagctatgattatgccattgcactccaacctgggcaacaccgcaaaaccctgtcccccacccccgcccmaaaaaaaaaaaccacaaacccatattaggtattcatgcaaaaactcagtgataccktagccagcaaatcctctgagaagggaatgcagctcttccttaagtctgctttgtagtgtttggttgtgtgggtttttttaacttcataaatcatgggaagctgtgctggcagtaggagataactcagcagtagacagattgctcttcgctgctttcttttaagaagcaggttataaaactgttgggagcctggtggagtagttaatagatcatcgtaagcaatttgaagtaatttttttttttttgatacagccttgcattttgaaggcaagcgagctagagagaaaagagtttagtgagtaagaaatcrgcgccacctctgattttgtgccacctctggcacaagtttcagggcctctgggtcccccagcctggaacttgtgccacactctctgcctcactgtgtggccagtcacttgcatctgtggcagagtccctgcrgtgaaacccatgttggaatgtgactgttcagaatgatacacgttcttgtcagtgcatagttggcattatgatatgtttttcacaaaaatagttctataatttagcctgttttttacatcctaaaatactttgtctcctgctagtacattttggtaataagccttgggatcccagagcatgctgctggagtatctcttcattgataggtctattactacgtagacatcgccgtaaggcacacattaatacaaggcaatgtttgtagtaggctgtggtccctcctaaaccatgagatagctgcattgaagtgtcacgagcagaaacaaatacctggcttgggagtactttaaattagcagataactgtcacttgaaaggtaattaagaascttctgccaatggctctctttttatctctagacactgtccccaaaagcttttaagttacagtcttgttggtcacgacttataataggcctgccatgccgatgatacagtgctaagttagccagacacttaaaagatctttttgataaatataaaatatttttaaaggaattgggaaacaaaacatcatgtgaataaaagtttgttttgtgatcctggactgggttttagatgaaattcatgaaatcagttctaaaacttgaatcttactttgtttcagaccactaaggcttttcttcctacgatgctggagattaatcatggtcatattgtgacagttgcaagttccttgggattgttcagtactgccggagttgaggtttgtcagatatatagcatttctttcgttcaatctgtttatcctgtgataagtacaccagaacctccaggagagcacctgctgcccctccattcatgaaagctgcacgaaggcactctgcatgtgtgctgcatgtagaatgttccacaggaacccagggccagccactggaatggaattctatgtcaggtgtggtggcgcacacctgtagtcctagctacttgagaggctgaggtgggagaatcgtgcgagcccaggtgttcaagactgcrgtgagctatggtggcaccactgcacttcagcctgggagatagagcaagaccctgtctctaaaacaaaacaaagaaagggaatggacttctgcctcttctgccataaaatctcttacactagtttgacaaagcagcagcgacaagaaaagtagatgggccagccctcagtgtgcccattttcattagcagcttcacttgacgatggcaggaggcacagggccaagaatggaaccatggaaagctgtggggaacagaagaatgaggccagaggttcacattcggttgtggtcaccttgccaaaactgagctatcttgtattaattagcccatcagatgaggcggtcaggtatcctgcattgtaagtttgtagaattgtagaactggatttcatcaaaccctgttcttcacgatattcagattataaagtatgagtatatatgttgttctatcctgtttgtcctctgcatgcctgtaaaactgaaaacatcactccatgcaaatatgcaaaaggacacattatttaaatagcacctatatcaagggattccatttctgaagttgggccatggacaataactttttttctatattctgtgcctttaggttaagttctagtttaagattacaaggcatgattatcattttcattttaacttcgccttacaaagaaagtcaaatcataacaatttatagcctaagctagatttgcctttattcttcttgcattaatttaaacaaactggtttttctttctcctttactgaacaagagaccatttgtaaattttccagacacttcaaagtgaacctctctccattttaacttcagcttgtgagctttcatagaatcctttatggtaacttccccaaagtaatatgatacttagttgatgtgacaaaaagtattcatctgtttctgctgttgctttgaaaatattatttctgcactgaaccacatcaggtatctggtttgtgttttttttttgtttttgtttttgtttttgtttttgttttttkttttttgagacagagtctcactctgtcacccaggctggagtgcagtggtgtgatcttggctcactgcaacctccacctcccaggttcaagcaattctcctgcctcagcctcctgagtagctgggactacaggcacaggcccaccatgcccagctaatttttgtatttttagtagaggcggggtttcaccattttggccaggctggtctcgagctcctgaccttaagtgatccagccacctcggcctcccaaagtgctaggattacaggcatgagccactatgcccagccaggtatctgtcttttaaaatgatttccttttctttgtgtagtcacctgtaaccttatgtattagacatctaaacatggtaataggaccagggaagctttagtttggttggagataggggcatatgcttagtatttctgctttctcccctctttaactcaggattactgtgccagtaaatttggagttgtgggttttcatgaatccctgagccatgaactaaaggctgctgaaaaggatggaattaaaacaaccttggtttgcccttatcttgtagacactggcatgttcagaggctgccgaatcaggtcagtgagaacctatattattactgataaaaagaatatgttgggagaatatgtggaactggactttcaaacataaccttgtattttaactatcatttgacaatctgtggcttttattggtcaagatttgtaaagtttgtaaaattggtgtataagatttgcaaaggagagactggtgctacacactgatactaatttgcagaaattaatccagaatcattagataggaaatggcttctctgtaaagagaaaacataagtatccagtcttttccttagaagctcatcttttggagttattttgtttctttaaaattggtattggtaaataaggattctagaagaaaattccttcatgtgacttgggtctggatatgaagcaatgttactgtcacagagagtaacgtgcctttcttctgaaaagaccattgaatattacactccagatttggaaacttcctttttgcagcaagcgtatgtaactagattcactctggcagaatgagaagaaccatttagatatactgaaaaatgaaataaaatacccacacacatagaaaggaggtatatgggaatataaatgtcaagttacatctgacttgagctcagcagaataaacaaaactgtgaatcattaagaggatgcttgtgaagacatgcttacttttatctttgcttgggtgagtttgaaaggcaaaggaagataaccaaaccagttccctgttggttgggggccattcttaacgtgtactgaactgaacaagcagcaaaataggtggaaggtgatttgaatcactccaaagtcaggcttggagtcccaagtctgacctggaaaatggactctagctctgcctcttatcccacacatgtgtgtgtctgtgtraacatgtgtgtgtgttggtggtttgttttgttttgttttcctcttatgtacttgggaagcagttgctgagggtcttgcggagctctgtttcctccagtgtagcatagcagcaggtgcaggggtccaaagctatggtggcaaaatgaagaatgaaaggaataaattgcacactatcatttcaacatgtaacccagtgaatcaaactgaaggtaggatgtctatatacccttcatttcaggggcccctagagaatataccttagctttccctcttccggcatcctggaaagtggatacctgtggccttcctttcactttgaaagcttacaccctcattttgactacaactaatactaaaagcttggcatcttgcttgagattagtgtttgctatgccaaacaccttctcctctttctattgaaagcaaaacataggaaaataatttgaaatacttttaaggcatcttaaaaacatgactttttcatcttatggaaaagcagaccaattttgcttttttttcccaacttgttctccagactgtgccaataaaatgtgttcatagcaggaaaatttggaaaatacagaaaagcactatgaagaaaacaaaatgtacccaaaatcccatcactcagataacatcactgttaatgttttgatatgtatttccagtcttttctattgtgttaatttttcattttgtttttgaataaataactttcaggaaagaaattgagccttttctgccacctctgaagcctgattactgtgtgaagcaggccatgaaggccatcctcactgaccagcccatgatctgcactccccgcctcatgtacatcgtgaccttcatgaagaggtaactgggaggggttccctcactgactgggtctctccatgcctgcccgatgtcttaattgaaacttcaagtttgctaacagctgtgacttccctttttcagcatcctaccatttgaagcagttgtgtgcatgtatcggttcctaggagcggacaagtgtatgtacccctttattgctcaaagaaagcaagccacaaacaataatgaagcaaaaaatggaatctaagaatctttttgtatggaatattacttctatcagaagatgatcaagatgtttcagtccagtgcacatcagcattgctgacattttatggattctaaacttgtgttgtttcttttttaaatcaactttttaaaaaaataaagtgtaaattaaccgactagagtacttggaaaatgtgatcagtacaagtgaacttaggttgttgccaacagggtccttttaggcagaacccagaaaccagtcaaatctgtagagaagcagtgtgacatcttcaggttaccattattttttaatgagcaggaagtctagaaatgataactagactgtatgtttcatgtgtgtgatttttcagaattcccagagtttactcattcttgttattaaactctagccagttgacatcttcgcaatttcaaggactgatagtgctgtattttctcacgttttctaagtttccgttttgcaaggcctaggtgactttttcatggtgtttgtatgtttagctcttttgaaaaggaattttgaaatctccatcaactgaagtaaatgatgtctgagtgttacagtaaaggtgaccaagtctctttcttaaagtcacaatgactaaagtattagttgaattttttttttttttttttttgatggagtctcgctctgtcaccaggctggagtgcagtagcacaatcacggctcactgcaatctctgcctcccggtttcaagtgattctgctgtctcagcctcccaagtagctgggactacaggcatgcgccaccacgcccagctaatttttgtatttttagtagagacggggtttcaccatgttggtcaggatggtctccatctcttgacattgtgatccacctgcctcggcctcccaaagtgctgggattacaggcatgagccactgcacccagccttgaatttttaattttatctctgatatacttcattaagtgtctggagacctaattatcctaaaagatcatacattttctacctatgaattttgctgcatacagaaagtgccctttcctcaggaagttgctgtgtttcatttctttggatggactcttatctagaatacatagcagctctgcaaagaaacagtttttaaaaatgggaacttctacattgaaaagtccccatttttgtgccaactatgattagtgagaggaagaaatcttattctatggcatatgtatggargggtgtaaagattcttttgaaaggtttattcacattgtagaacagcaaatgacatttttacagtatttttttgtaaagcaaactattttgtgccttgaatttggtatatgtgtattagtgaaacattgtaaaggtgaacttctacctctgtatctaaatgtataccatccacttgtaaatgactataaactattatgtgattgcttttttttttagaatgtcttgtttaaatagtggccaatgtytaaggctgttaaaataagccaacttttacwaatyggggagttttmtaaatgactgattaaatttamagaattaacttacatgcaattgtgtgattattagttatcagcagtgttgtaaggaaaattattgtgtttttttttatgatcattatcccactttaggtaaagaaaaatattggaatggaatagtgttgggaaacagacattaacaacctagggtgcctgcactcaaatagccgatgttactgtccctagattagagacttgattaagggcttgtttgtaccaaaagtggggaaacaatgccatgacctgtgttttagtttggctgcaccacagatcaaatctgcactgtgtctacatataggaaaggtcctggtgtgtgctaatgttcccaatgcaggacttgaggaagagctctgttatatgtttccatttctctttatcaaagataaccaaaccttatggcccttataacaatggaggcactggctgcctcttaattttcaatcatggacctaaagaagtactctgaagggtctcaacaatgccaggtggggacagatatactcagagattatccaggtctgcctcccagcgagcctggagtacaccagaccctcctagagaaatctgttataatttaacaacccacttatccaccttaaaactgaggaaagtcgtctttacatctaattttattcttgtgtgttataacttaaacctatttctatttttgtttgttattgcccttataagggtgtccatctccaagttcaataaactaattcatttaacttttttgtagaagtctttcattcccatgtcccagcccagttcaatcacttctgtggctcttccttgaatgttgtccatattctccctcccatctttagctgtggagtttggaaagggatacagttaatgcaggtttagaactatggaattcctacaagttgcatttcttcatcccaatgtcacgttcttattaatgctacattgctgattgtgtgcattattgtttctaaacatgaaatctcttctagacaagtctgcctgtttgtgttgatcacttatgtaattgccaaggttgcttttctggctggttatttatctacacctgcccccaccccttaacatgaatgctgactttgaatatgttctcttttttgtcatctggcccattcatgtgaatgttcagggccactgcactcaaggctgatcccctaaggagcaccacctctgtctgtgagcaccacccccagctcatactggcactctccctttctctaacctttcaaccaatttaatgataattatattgagtgggaccsaggaatcaaaagttttgaagccaacaaacataaattccaactattgttttcccccttgatctaccaggtctgctgctctgtcacaaaagattagattagcctgacaggattgagctacgtaaagccaggctggggtgtgtgtgtgtgtgtgtgtgtgtgtgtgtgtgtgtgtgtgttaggtatcctgtttccttagaaggctgtagctttcaaattttctcaagttaaaagaaaatgttttcttttccaactggcagaaataattctaaattgacattgacctgaatcttggaaatttgcttttgcctccagcaaaatataagatcagtaggggttgggggaacagggtcattctttctatgccaaatgtattgcctgtgcctgagtcagaagagtagggaaagcaaggatgtaatggttcggaagtggtgagatgtgggccctgggcacatgtagtcagcatttgcacaccaggcatctgccgaagcgcccatcccagggactcgagcgtgcaggtaactcacaagtacacatgtaagtatctatgtgcacatgccacaaatgaagcctcagagtatgatgacatctcagtaagggaaggaaaggtggcctggaaggttggtgatgcaatggatggatttgggaatgggagtttgcagattccggggaacagattctcaggaaaggcccagagatcaaaaaaagtagattatactcattatgactgaagcatagaacatgggaagagaatgacatgcgttccctaaggagatcccatcttgagaatggccttcattccaggctgaggaatgggcccttcatttgatacagaagagagaagccctagaaagttttttttagcaggaaagtaacagaagcagagttgtaagttaataggatcaatgaagccgctgtgaagaatttcaaggcacaagaagtagggagcagtgaggaaggaagttattgcagtagtccacggggaggtgctaagaatgggccagcaagagagggggatagggaatggagggagaaacccaggctgagcaaccgataccgcaggaggttgaacttgcaagcctaggtgactgaagatagcttatccctcgagccaagtggttttaagtgggaagaacagaattcaccaacagtgaatctgatttagaaatgttgcatttgagatgccgggtgacaatagctggcagacaggcgaataatcctggccctcgggaaacaggttggtgctgggatcctgaagtcatccacatagaggctgtgaagtgaacaaacctgggagggggaaagcacagaatgagtggagatccaaggacccagcttggggaatgtgggggagcagcagcagaaggtgtaaaaggtgacagagtaaagttaagaagggaactttctcctcccaaggagaaaccagactagaaataattatctcctctgcttggacctagtccccaggctgagtcacacttaagaaacctcagtctggcccaagaaaaagagtctgtgtggccagccctggggcagaggcccaaaaggtgaagggcagtgttaacagacagcacatggaggcttcgaccatgcactcgggtttctagtaactgaatccattgttaaaaggaccaaaggaaaatttcttcctgagtgaatcctggaaactgttgttctttggcaattttctttgcttggcctcagaagcatgacttgcttagatgtgcaagcaatgtttcatcagaaccctggggaaaaacaaaatgcactttgagtatcaccaaatggatacatgttagtgcaaatgaactatttttatgtgccaaaaagatgagacaggacctgcttctatcagggtgctcaaaaagacgggttcctatctggtccttgaagcactaaactcacagcgggccaagaacctctcaggcaggtcctgggtcaaggtggacatgcagtgactcccagctttcccaggaaatgtcacggcagagcagtgtggaaccacagtcttgctactgtttattatgacgctttctggggattgcagttcctacattacaatagctataccaaagcacctacacatttcacaactcatctattatttgggggaaagcattgacaacacacagccacacagtccagagaatcctgctcattgagtaattatttctcatttaacgtgctccgttgctgtagagaacttaatgtcttccaggagctcctcacaggcttttgagctgtgactgttgaaacatttctaccactagcaaaacgcaagagaattgattagcaagaaaaacaaagcatcttcagcccagattctaagtttgaggttttcctgtcaaggtgattgaaaccatgctgcagggagaaacgtgtgtgcatagcagccatgaagaatgcccctctccttgtccatacctcatgggtggtccacctgaatgccactcagcaggcatcccctccccctagggaggaacctgagcccagctcctccagccctctgctagcaggtggccatctcccggccagcccagcttatccagggcctgagtggtccaggaggctaatgagcagatgggagtcctgcctggacacaggcatacttacgtatgttgacagcacagtatccggcagccacagagttcctgcttaagagctcagtgttgtggattggatcatgtcccctcaagagatgtgttgaaatcctgacccctagtccctgcaaatgtgtccttacttggaaatagggtctttgcagatgtaatcaagatgagatcattttggtcaggctcagtggctcatgcctgtaatcccagcactttgggaggctgaggtgggaggatcacttgagtccaggagttcaagaccagcctggatgacatagtgagaccccatgtctacaacaaatgagaaaatcagctgggtgtggtggtgcacacctgtagtccgaagaatcgcttaagcccaggagtttgaggttgcagtgagtcgtgatcgtgccactgcactccagcatgggcgacagagggaggccctgtctcaacaacgaaaaaagatgaggtaattttggattagaataagccataaatcccatcactggtgttcttatacaaagagacacagacacacacagagagaagatgccatgtaacaataggcagagatcggactgacgtagctgcaagccgtggaatgccaaggaattgtatcaaggaccaacagctagaaaagaggcatggagcaggccctccctcagtgcctccaaaaaggaaccaagcctgctgacacctggatttcagatgcatagcctctagaactgtgaaagcatagatttctgttattttaagtatcacccagttggtgatgctttggtacagcagccctagcaaatgaatacactcagggtctgttgtcagacagcctgagtgcaagtccagctctgcatctccctagccatggatcccaggtctttttcttaaccttcgtaagtctcaatctcctcatgggtacactgggaataactgcagtacctatatcaagagcatcgtgaggaatgtgggaggacacagataagcacttaggactgtgcctaccacaccttggaggtgtgcaatagattgcattaggttgaatcatatgaaattgctgtgactgaattcttttgacctacaaaaaaggcacttttatctcgttcaacataacagtgatgatgggggatggatagtgacagtacctagatcagaatctctatttatggtactgttttgtgtttccaacaattcttacttcctgacacccactggatgtcctacagttcggtccaattctgacacttcccagagttagtgcaggccccacaggttaaggttttgatcccacaagactgcctccacttcagataccggccagagaatcgcaaatggggtccccaggctacccatgcttctgcccagctgactacaaattcagggttcacaagacccctgctcaggtttgataattcactagaatgatccagaactcaggaaaacactatgcagtccttgattaccgtttattagaagggctgcacaggcacagccagatggaagggatgcacagagcaagccctgtgggaagggcgcgggcttcccatgccctccccaggagccaccctcccagcacctccatatgttcaccaacccagaagttctccaaatctcctcattaaagagtttttacttaagttttattatgtggacatgattgaccaaaccatcggccacaggtgaatcaattcagtctccacccctttttctctccccagaagtgacggggtttgaaacttcaactcctcccttgaaactctctaagggcccaccctgtccacatcattagcatagactcaagtaggatgtaaagaggccggttatgaataacaagagacactcgtgtcactgtggaaattccaagggttttaggagctctgtgccagaagctagggacaaagaccaaatatagtcttcactctactgcaagtacctagtgtgttgcaattagttattggtacatctgaagacaagtgtcctgttctagtgatctcggtagtcttagttccaacatctcacgtagacccaagcacacagtagatgctcaataaatgttgatcttcatggccctttgtgctcttcaaatacttggtggtctgtgaaataggaatacccaagcatggggctttcccaagtctgtgcaccagagaattttttttccctgccctgttgctcctaaacgaactgtgaggacataggagtttactacttatgtgctctttgagcctttgctctgatcaacgtcacctgtatgcaagaggttaccgaaggccagaaaagtttgtaaggcaaccgcacagatgctgcttctaccaaaattaaacaaggagagtcctcccaagccctcagaatatctggccagtcttggatagttcagagagtaaaacaagttagccaggttctgaataggacaaacattgagacagatgcaaacagagagaacttccatctgacccctataaacaccattttcttctggcttgcagtgacaatggaaagcttatcctttcagggaaaaaaaaaaaaaaaagaataaacagtgttctctgttctccagaagccacctttattttctacccttttctctgactttggcgatggtttggcattgtcagatttcctgggactcactgcagtatgctgagggggtctttgaaacacccccagaagtggacctgagatgcttttctcatgaccactctgggagcccaatccactgccctgagtgctcctgaagcggaggcccttgaggactgagagccgggaaatgcagaacctggccagggagtgaagaaatgaatactgctgtcagggaaggaagtagatggagcaaaactgcagccccgggggagattccctaaccacagttcctccagc

SEQ ID NO: 94261 - DNA, 18656 bp, Homo sapiens
gttcaagaccagcccggccaacatggtaaaaccccgtctctactaaaaatacaaaaatgagctgggtatggtggcacgcgtctgtaatcccagctactcaggaggctgaggcaggagattcgcttgaacccgggaggcagaagttgcaataaggggaaatcgcaccactgaactccagcctgggcaatagagtgagactctgtctcaaaaaaaaaaaaaaaaaaaagaggaggaagaacttgggggagaatgggaggcagaagataatcatctcccaggaagcacagggacttgggcagggacccccaccccgcaacaatgcacacaccccacacctctctccttggaagggaggggccaggagggcctgagagactctacttgattttccagaagttacaggagagagtcgctgcaaaacagcccagcccatccaggtcagagttctcacccaaagtccaaagcctgcaatttaccagctgatgaaacgaaacaacctctgtatgattacctgtatgttaatgcctctgggcatcagtttcagtttcccagctgttaaattgtactaaaaatagcctgggtgtggtggcttatgctcataatctcagcactttgggaggccaaggcaggtggatcagctgaggtcaggagttggagaccagcctggccaacagggtgaaaccccgttactactcaaaatgcaaaaattagctgggcgtgatggcaggcgcctgtaatcccagctactcaggaggctgagacaggagaatcgcttgaacccaggaggtagtgagccgagatcacaccattgtactccagcctgggtgacagagtgagactctatctcaaaaaaaaaaaaacaaattgtaatgaaaatacagcctacccactggggctgggcgcagtggctcacgcccgtaatcccaacactttgggaggccgaggcgggcggatcacctgaggtcaggagttcgagaccagcctggccaacatggtgaaaccccgtctctacttaaaatacaaaaaattagccgggcgtggtggtatgcacctataatcccagctactcgggaggctgaggcaggagaatcacttgaacccgggaggcagaggttgcagtgagccaagatcatgccattgcactccagcctgggcaacaaaagcgagacttcgtctaaaaaaaaaaaaaaaaaaggcaaagaaaatacagcctaccccatttgaatgctacaagtgagaattaaatgaaatgatatttagcaaagcattcaggaagcggctggcaaacaagctcttcttccccatacatgctactgtgaaagcaacattggatctgggctactcttccactccaccctgttgtccccagtgttgtggacatttaagggatccagctgaccactgggccaacctcacagccagcctgcactgtccccaagccaggtggcagaatcccaaaccagtcctcctcacttctgcaccaatcttgtgttaaatactcagtgtccctggaaaccccagccaaggtcatctatggaacctgtgcttccggcacagctctcacttggccacttgatacctgcagggcagccaggagtgaccaggagctctctgggtgtcaaacatctatagcacctagtgtaacctcaccagctatttccaagaagccattcaagatgcactgctaacatttaaactgaaaaccgagtcagggttggctggaacctgtgagaccaggaactgacagccagttggaccagcatgccagggaccatgtcagatggatgtcaggtcataccagggaagatgagtggcaacatggcgttcaatgtactactggtgaattaaattgcatatttcactcctttcagaagcactcaagttcatgggcaaaaaggaatgccaagaaaagtactgatcagttctgatggccgggcgcagtggctcacacctataatcccagcactttgggaggcagaggtgggaggatcgcttgagcccaggagttcaagaccagcctgggcaacatagcaagaccccgtctctacaaattaataaaatatttaaaaattagctgggcatggtggtgccacctgtggtcccagctattcagaaggctgaaggagggttactgcttgagcccaggacttcaaggctgcaatgagatatgatcacaccatttcactccaaccccgggtgacagaatgagaccaaaaaaaaaaaaattctgagcacaagggtatgccacccgcactccactctacccccggccagaaaagaggctaaactaagcaaaaggttatttggcgaattgcatgggaaatactgtatactcgttaaataaataacaaaattgtgaaaataaagtaagactttgtagagacaagctataaaaaatgtgtgaaatgctcataactagcaagagagaaaagggtaaaaaggatggataagccgcaaagagaaatcatcctatcctgtgtaggatgacgtaacttggatccagcaggaaggctggcccaacattaagtaggggacataggaaggggtgggtagagggaggaaagtcctttgtgtggcctcaggctcccaattctgccaggttacaatctcgattaatggggggttgggcaaaggctcatcattaaaggaagagttcggccggatatggttgctcaggcctgtaatcccagcactttgggaggctgaggcaggtggatcacttaaggccaggagtttgagaccagcctggccaacatggtgcaatctcatctctactaaaaatacaaaaaattaaccaggcatggtggtgcgcacctgtaatcccagctactcaggaggctgaggtgggagaatcacttgaacctgggaagtggaggttgcagtgagccgagtgccactgcactccagcctggggcgacagagtgagactctgtcaaataaataaataaataggagatactgttcttcagcccctcctccttcctgctggctggaatgtagatgtgatggctgatgttccagcagccattctatgccatgcggtagaagtcacatgctgaagatggtgcagtaacaagatactgtgcaaggagcaacagggttccgtgtaaagaagcctggaccctgacattgagggcaccatgccaaccctgcaagactcatttctaggtctctttttttttttttttaagacagagtctccctctgtcacccaagctggagtgcagtggcgagatcttggcccactgcaatctccgcctcccaggttcaagcaattcttgtgcctcagcctcccaagtagctaggagtacacgcacgcaccaccataccaagctaatttttgtatttttagtacagacaaggttttaccatgctgcccaggctggtctcaaactcctggcctcaagtgatcctcctgcctcagcctcccaagtagctagaactataagtatgcaccaccacacccagctaattatttttattttttgtagagacagggtctcaccacattggccatgctggcctcatactcctggcctcaagtgatcctctctccttgtcctcccaaagttctgggacgacagtcactgcacctggcccaagaaatacatttctattatttttttttttttttgagacagagtttcgctcttgttgcccaggctggagtacaatggcatgatttccgctcactgcaccctccacctcctgggttcaagcgattctcctgcctcagcctcctgagtagctgggattacaagcatgggccaccatgcccagctaatttttttgtatttttagtagagacagggtttctccatgttggtcaggctggtcttgaactcccaacctcaggtgatctgcctgcctcagcctcccaaaatactgggattacaacaggcatgagccaccatgcccggcctctattatatcttgttaaagccattatttggtttttggtctcatacagctgaattgaatattaaccaataaatagaggaaataagaatcttttgtgttagaagatgtggatcaaggtctgtaatagaagtggggttccctgccaggcatggcagctcatgcctgtaatcccaacactttgggaggctgaggcaggaggatcacctgaggtcaggagttcgagaccagcctggccaacatggtgaaaccccacctctgctaaatatacaaaaattagccaggtgtggtggcaggcgcctctagtcccagctactcaggaggctgggaaaggagaatccttgagcccaggaggcagaggttgcagcgagctgagatggcatcatctctacactctagcctgggcgacagagcgagactctgtctaaaaaaaaaaaatggcgcttccttccaaggtgggagacagagataaaagaggggtagggaaattctctgaattggcagaactggtagtagaagcaaggctcattcctggataaacagaaatggtgagagaagaaatgggaaaaatcaaggacatccctgcagtgacagctgtggagggtggggagtttactatgctagactatgtagggaaacgcctcctggcttgacaggttaggtgcctgtgttgacaacggttgctgagagctcaaggtgaaaagagggatagttccaggaaatgataaccctggtgataaactatccctgccctccctatcttcattgtacaggcctagaaactcgtgacgacagaggttaggtgacacctgcgtggcacagttcgtctggagggtgacaggggcaagccttcatcactagcagggccaaaaatccctaaagcctcaggactggggcaggcctcagagcactcgttcacagtttgtttccatcattttatttttttgcggagaagggagtctcgctatgttgcccaggctagtctccaactcctggactgaagcgatcctcctgtctcggcctcccagagtgctgggattacaggcaccgcactaggggccacacgcggccccatcattttaataattcataattaccacgcttagaaacctgcctcagattcattccccccgcagcaacacccaccatccaccctcctgtcccctcccccatgcacagcccttacatctgctcttcagggatctcaactagggcacatggtctggccagtgaggagccttcaactagtgcggccagaacgctgaaggccggatacaaggagcctcggtgtccaggcaggggatttggggttgcctgagattggggcggggaaagccggagacagtgggcacagatggcgaggggttcacctccccaacacccccaacccagcccagtctccgaggcccgagtggctgctttttgcgccacctggcggccgtctccagcgagcggagcgcgggtgaccgtgcctgcgggacccggttcccgtggggcgagcgggcgtggggcccgcccagcttggagagccgggaaccgcgcggcccagggactggcaagactccggattcaacccctgcgaggccccgcaacccggtgcccgcggtccctggcggcggcgcccgcgtgcccgaggcgctgcggggcgctgcggggcgcgcggcggttagagcgagcgtgtgcgcacgcgcccaccccacgccgcgccccgcaccgccgcgcgcgcgcacgcacgcccgacgctggcctgcgccggccgctctcccacgcggggtctcgggggctcctgagccggccgcctccaggaagcaggcgccgcgcggtattgccgcatgcacctcggtcgtggggaccccgctgcagcagccctgtccacacgggtgaactcctggagggcggggcggggggcaatctgcgcgggtcaggcccctcggagcaggctgggggcgcccgagccaggccgctcccacctgccagccgcgtggccaatgaatgctaggcctggtgatgtcatgccccgaccggaccctggtgacgaaagtccgaagtcacccgtcagggaaccagcacagacccacccgcgggggttccagaagtttccactgccgccgcggagtgcggcctcgcccagcagccttgcgcgtgctaccacgctgtcctgccttctcaggtgtcccaagtcaccccttcctcccccaggggtctcctgtctccatgccctcccacctcatttccactagcgatcccattttacatctccattcccacaggtgtcctttcatccccaggagtgtcccacgtcaccttttctgcacccgtgccacctggacccctaaggggacggtmctctgccacactcccacatgcctctcctcccatgccacccgtctgtgtcgtggccggggatgcatgaccccttggccttgcgctaacttcaccagcctcgagcgagaccgacagggtgtccaagtgtgtccgtccgtctgtgaaagtcgtccctgcgtttgtctgtgcctgtcactgcatgaggtcgtccgtctgcgcgtgtctgtctccacgggcttctgtccgtctgtctgtcacgtgggtgtctactccgccgctgcaggtctttgggtcgcgtctgtcactgcgctctgtcgtcggtcggcgtctggcactggagtgcgtctgggccccggggtctccgggtctcggctccaagggagggagagagaggggaggtggccacccgggagagcggggaggggcgggggcggagacagtgggcgggggcgggcgggggcgctgtgaggcccggagggggtgtgtgcggggggccggaggcggcggctgtcagagtcggctcagcctgcgccggggaacatcggccgcctccagctcccggcgcggcccggcccggcccggctcggccgcctcaggtgagtctccctccccgcccgggactctccttaaggcccgggtccggggcaccgtgcgctccccgaggggtccaggcccccctaacgggacggctcccgcttccccgggcctgccccgcgccgccctccgctgccccgcactcgtccggaactcttccccggccgcctcacactcaccgacgcccacgcaggagcccgagcccgcgggaacggccgccgcctctgcgctccgattcccgcggggacccccgagcaccccttccccgatcgctccctagtccggggccactggaagacaccccctaattggggcggtacccgagctgcgcaggttcccggcgccgggctgggcacccccatccccagggccacaagcccagcgcccctgcgcagcgccccgcagaggccccctccgaggcccaggacgccccctcccgcggagactccatctctattttttgggaaggggaggctcggcggaagccccgagttataattagcgccactcgggtttcctagttaatctccagcagcaccaccacccmccgctcagggcggcgggggctgggctaggagtgaccggcgggagaggggggagttcccacccggggaattttgatcctttggctggagatgccggaaccgtagcagctgctgcccccaaaatagcgcccccgcccctgcagccggggatctccggagtcccgggaacgcaggmgtcccggctcgcccttcaggcggctctgcaaggccctcgagcccccaggccccctccccaagttcccggctcctggctcggggcggggagcgccgaccttttctcggtctctactgccctccgccggcggcggcgtgyacggcagcttcagacggatggggggctctcgagtcctgggggacgcgggctggcgagcctgtttgctggggctgsgctgggagcgtgcgcagctgatgggaacccgcgggcatcagcgctcggtgccagacattggatgagaaggggcagggttgggtggggagtggactaggcaggatttgggggaccccgggacctgaggcttccacaccctgaatgcccagcccaccgccccccagggccccrggtctggccgacccaggagagcgrggmtgcgccttcaggccgccgcaagctcccccagcggcgctgcccgtccgtgaggccgcgcccctgtcgggtggcctgttcgtggactgaggcttctggtgccctcactgcacgagctgggcccggcccagttccgggaagaggtgagggcagtggacccctgcggagcagaragggtgctcctctctgttccctgcatttgtctggatatgggtgtctgcctgatctctttcccctcctgcccgctggcctgtgtccttgtctctgcctgtctccttccctccctccctctctcccctcatctttgccaacctgccccacctcctctgcagctgagcgataacccttgggccgacagtgccctaatctcctccctcctggcttctcgaccgacccttcaccctttccctttctttctcccagcagacgccgcctgccctgcagccatgaggcccccgcagtgtctgctgcacacgccttccctggcttccccactccttctcctcctcctctggctcctgggtggaggagtgggggctgagggccgggaggatgcagagctgctggtgacggtgcgtgggggccggctgcggggcattcgcctgaagacccccgggggccctgtctctgctttcctgggcatcccctttgcggagccacccatgggaccccgtcgctttctgccaccggagcccaagcagccttggtcaggggtggtagacgctacaaccttccagagtgtctgctacyaatatgtggacaccctatacccaggttttsagggcaccgagatgtggaaccccaaccgtgagctgagcgaggactgcctgtacctcaacgtgtggacaccatacccccggcctacatcccccacccctgtcctcgtctggatctatgggggtggcttctacagtggggcctcctccttggacgtgtacgatggccgcttcttggtacaggccgagaggactgtgctggtgtccatgaactaccgggtgggagcctttggcttcctggccctgccggggagccgagaggccccgggcaatgtgggtctcctggatcagaggctggccctgcagtgggtgcaggagaacgtggcagccttcgggggtgacccgacatcagtgacgctgtttggggagagcgcgggagccgcctcggtgggcatgcacctgctgtccccgcccagccggggcctgttccacagggccgtgctgcagagcggtgcccccaatggaccctgggccacrgtgggcatgggagaggcccgtcgcagggccacgcagctggcccaccttgtgggctgtcctccaggcggcactggtgggaatgacacagagctggtagcctgccttcggacacgaccagcgcaggtcctggtgaaccacgaatggcacgtgctgcctcaagaaagcgtcttccggttctccttcgtgcctgwggtagatggagacttcctcagtgacaccccagaggccctcatcaacgcgggagacttcmacggcctgcaggtaactagtggctagctggcrtgaagctggctcctctgggtcccaacggtccctcccctccctgcagggacccaggcatgagggcttctccaggcccattcccagaagtcccagaagtcctccctgagggctcagatcccagggtggtcagcagggcagacaggaaagccaccatgggtctattttctctttctctgcatccctcccctgatctcgtcctctctctgtccatggttccgggtctgtaactgttcatctctctggctctttstctgtccatctgtttctgtctacttgtctgtctgtgcctgtcgctccatcccacccccctctccctcacccccaggtgctggtgggtgtggtgaaggatgagggctcgtattttctggtttacggggccccaggcttcagcaaagacaacgagtctctcatcagccgggccgagttcctggccggggtgcgggtcggggttccccaggtaagtgacctggcagccgaggctgtggtcctgcattacacagactggctgcatcccgaggacccggcacgcctgagggaggccctgagcgatgtggtgggcgaccacaatgtcgtgtgccccgtggcccagctggstgggcgactggctgcccagggtgcccgggtctacgcctacgtctttgaacaccgtgcttccacgctctcctggcccctgtggatgggggtgccycacggctacgagatcgagttcatctttgggatccccctggacccctctcgaaactacacggcagaggagaaaatcttcgcccagcgactgatgcgatactgggccaactttgcccgcacagggtcagcagtgcagagggagagaaggctggggaggacaggagtcgggggcgggaggacacacaaaggcagacacacggagacagaaaggacgggtgggacaggggcaggatagaacagccagagagggatatgctcacaaagtagataaaaggggagagaaaaagaaaggagacagagaaggcagagggggtcttgcagagacagaggcaaaggaaagtgaggaggagacgaggtagacatggagggggcggggcacagtggctcacccctgtaattccagccctttgggaggccaaggtgggaggatcccctgagrccaggagtttgagaccagactggacaacataacaagaccccgactcttaaaaagaaaaaaaatacaaaacttagccaggcacggtggctcgtgcctctagtcccagctacttgggaaggtgaggcaggaggattgcttgagcctgggaggttgaggctgcagtgagctatgatggcaccactgcactccagcctgagtggccctatctctggaaaaaaaaaaaaaaaaaaaaaagggagaccaagacaaaggagttggagctggattaagtcaaaccagtgatgattcactagcagtgacacattctctcacacacacaycagtttacctggatcgagaagaggacaatgaaatctagcattggatgggtgttgttaaaaaatgtgatgtttgtagacataggacccgtcctggttatttaggaaagtctcaagacatcctagccatttttttagtgagagaaacaaagatggaacagaaaagctgagggaaacggaaggagacggagcgcttgaggaagggaagaccccaatgaccgcgcacattggagaaagtggtgggagggaggggacgggttctctggggctctccgctgagctgaagagtccgggatcccgtggagttgggggccacctcctcccactgcccgtctggactgagccttcccttccttccgcagggatcccaatgagccccgagaccccaaggccccacaatggcccccgtacacggcgggggctcagcagtacgttagtctggacctgcggccgctggaggtgcggcgggggctgcgcgcccaggcctgcgccttctggaaccgcttcctccccaaattgctcagcgccaccggtatgcaggggccagcgggcagcggctgggaggaggggagtgggagcccgccaggtgtaacccctctcttctccccctagcctcggaggctcccagcacctgcccaggcttcacccatggggaggctgctcsgaggcccggcctccccctgcccctcctcctcctccaccagcttctcctcctcttcctctcccacctccggcggctgtgaacacggcctcttcccctacggccacaggggcccctcctctaatgagtggtcggaccgtggggaagggccccactcagggatctcagacctagtgctcccttcctcctcaaaccgagagactcacactggacagggcaggaggagggggccgtgcctcccacccttctcagggacccccacgcctttgttgtttgaatggaaatggaaaagccagtattcttttataaaattatcttttggaacctgagcctgacattggggggaagtgggaggccccggacggggtagcaccccccattggggctataacggtcaaccatttctgtctcttctttttcccccaacctccccctcctgtcccctctgttcccgtcttccggtcattcttttctcctcctctctccttcctgctgtccttctccggccccgcctctgccctcatcctccctctcgtctttcgcacattctcctgatcctcttgccaccgtcccacgtggtcgcctgcatttctccgtgcgtcctccctgcactcatacccccccttcaacccgcccaaatgtccgatccccgaccttcctcgtgccgtcctcccctcccgcctcgctgggcgccctggccgcagacacgctcgacgaggcggagcgccagtggaaggccgagttccaccgctggagctcctacatggtgcactggaagaaccagttcgaccactacagcaagcaggatcgctgctcagacctgtgaccccggcgggacccccatgtcctccgctccgcccggccccctagctgtatatactatttatttcagggctgggctataacacagacgagccccagactctgcccatccccaccccaccccgacgtcccccggggctcccggtcctctgcatgtctcaggctgagctccctcccccgcggtgccttcgcccctctgggctgccaataaactgttacagccacgggagtgtgcgcgactagggagccaggggtagaggcagaacgccggaatcacgggggccgagtctatgcaggagcggggctggagggcaagaaacaggcgagctccgaggcgggcgcaaggcaaaggccaacccctagccctgccctgccgggcggagctcgcgcctgcgtaatgaggcccgcaggcaggctagctggcacggcggaggggaggagaggggaggggaggggaggggaggggaggggmggggcggggcggggcgcggcggagcattgtgggagctcctcggtcggtgccggtcggtggctgcctattgcggcctgcggtgatcaacgaggcccggggagcgcgtccccagtctgcgcgccggtcctgcggcagctggcccaagacccggagccgaaaggaagtgttggagcctgaggtcgctccgcgccgctaggaggacgctgtgcctggcctgggacctccgctcccgcccaccgccctggagccgctgagggacgtccacgtgggcctgtccccgccgagccgcggccctgtccgcctggcgctgctctcgggccactacctctactaccactacggctgcgacggcctggacgaccgcggctggggctgcggctaccgcactctgcagacgctgtgctcgtggccagagggccagcccgcgggcgtacctggactggccgccgtacaggcggccctggaggacatgggcgacaagccccccggcttccggggctcccgggactggatcggctgcgtggaggccagcctctgcctcgctcacttcggagggccccagggacgcctctgccacgtaccccggggagtggggctgcacggggagctggagaggctttactcgcacttcgcagggggtgggggcccagtcatggttgggggggacgcagatgccaggtccaaggccttgctgggagtctgcgtagggtcaggcacggaagcctatgtcctggtattggaccctcactactggggcactccaaaaagccccagtgaactacaggctgctgggtgggtgggctggcaagaggtgagtgcagcctttgaccccaactccttctacaacctgtgcttgaccagccttagctcccaacagcagcagcgcaccttggactgaggacgaagttacagaactgagattctcgggtcccagacacgcacctatgtacctcccactggtgtccctgcaaagcctggcgcttttgacatcaataataaaagtggcagggctgagcaacacctcaggagttactctggaaggatggaggagttatgtaacacacgagagtcaggagccctgtggaagtgcttttattagcagtaaggctgatcgtacaaaaaattctcagagcttcataggacaaggtagtacaagtatggatgatacaggactgaggaacgggggacggctcaaaagaaatcwacatcgtctggggcatccaggtcccgatattccacaatggcccttggrtctccacgaaccatcctgtgaagtgagaggtacaggatgagagctgagggctcccaaaagggagtctgcaggcggcaacaaagcttgggcgtctgccctcctcacctgttgcgaggtttcccaggataacctccctggcctcggaaggcatcatagttccctcgaccagcaccatacggggcatgggggtatggagggcctcctgtggggactgcagggcggacagcaccagctatgacagagatcagtgttgagttgcaaaactatgtcctcaattccatcctctgttttcttctcccaaagccacacactcaccaagccccttcatctccctcctgtacttacctccatagcccaagatcgggggccggggctgaccatagggcatcaggccctggggagtctggtgtgggtaggggagtcctggggtcaaacctggggggagtacaacacggacagggacatgaattactgcgggggcggggagggggatacgggtacaattgacttctagggctatggcctgaggatggggcagaaacttctcggggtgacacgttaaagagaaacaggagtccctgggtagtcaaggaagagggcacatgcgaccttcatggatcgtatcttactctgggcggggccaggtggctgggctggcttgatctcaggcagagctgggcgcttagcatcagtgaggaagttgttaaaaaacgcgacttcctttttcacttcctcaattttctctgcatgcttgttgaagatatgtttgcgcacaaactcaggaccctgggtggagagaggagaggggtcaggacagccacataagggttgcctcgctcccaggcccgagctggaaggattcccagctcccgcctgccagtgcagtaagcagttcccccacccctgcccagggggcttcctgtctcaaccccacctcccaccaccgtagcacggccattctccaacatcccacaccttgaatttcttgccactgagaggacacagccacttatccttgcccagttcctgcgtgttggaggtgacgaacttctccacttcctgctctgggtctttgcgccccatcttctgggcctcttcctctgagagtgactcccgcacactcagcaacggcgtgagcttctcctcaaaagtcttctgccactccagcactgtggtttgggaacagaggaaggaaggttggcaagggagccagaaggaaggatggtggcaaggggctggaggaccaaggccaggggcagccgggaacaaaggggaacctggagctcaccttccccgtgactgatgcggttgggtggcatgggcccccgaacgtggatgatcccacagcgattgggcatctcgtcctcgttggggtactcacaggtgttgtaataatccaaggaatgcacgatgcgcaggtaaaggaggagcttgtccaagacctaagggaagtgaatgcgagcgttcagctcctgccctcaccgcccgagcccccacgtgccccgcgctgccactggcaccttaatcaacttctcatcccgctccacgttgatctctgccgggttcccttccttaggaggctcctcaggaggagcgcccccgctgctccccagcagctcctcctcctcggcgcttacttcctcgatcaggtagtcggtgatattcttcaagatcgggttttgcgagggcaggctctgatgggaggaagagaagcaagtaaggcagagaagaccttcagaggaggtaacctgagactttccacaagtgaaagagcagcgaggggacaggagttcaccggacataaatggcaccttttgcccccttgagatttgtctttattttagcttttgttccaccccagccacaaatgatcactagcatccccccagttctgctggaatctggaggtgctgctacccacacacgaaggggcaaatgagtgagcaggcgagtgggtgcaagggttcaaggctacagataggtaaggtcagaggtgcccacagcagaggcactaccagttgcttctgacaaagtcctttggggagtcactgaccgtgggcaggggaggcgtccctggttctgaggcccaaagctgtgtcctgtcatccagcgtgtggatcagcttggccgccagcttgatgtcgttgcgcacaatctgcttgtgctgggtgatgccgttgatgttgcgaacgcgccgggtcaggtccctgttcacaccagggctcagctcacactcccggagctggagggcagacatcatcagcagcttaccccacttaccccgcttgccagagaaacagcagctctaagacccttccctcttgagcaccagcgattgatcagactgcgagctccctggggacggggaccacataggttccgtccatgctaacgccctagagccttgcccagagacaacgtagccagacaaaacggtcaaagagtgtgcagaacaaccaaactatcagatgaacaaagtcacacagaggtcccgtgtggcacagagtctcccttcctcttccccacagtcccacccccagcactcacacggatgttctgcaggttccaacagatctctttaatgttaacactgcggtcgaaggtcacccagccacgacggaaaaacctacacaagaaagaaaatgttagcatagtcaagcgagggagttggtgttggccattaacgttcccctgcacttttccctccaacgcaccgagttactcacctcctctctggctggggctctgagagcgccacccgcataaagcctgggtaccttttacaaagctgcaagaagcagaaaagcagccccacagtgactcaaggattcattcgcttcttcctccaatcccccactgccctcagaaccctagggactaactgccttatcactcttcccatccttgggcagggaaaaaccactaaagggcttcagaacaccagcacctgaaagccaatggcgctatcaggactagtcctcggaggccatggaacctggggaaggggcctccctagcaggtgaaacgggggcatctgtcacaggcagggccccactgccttccctctaccctccacttctccatcagccctgccctgactccacgggtccccactcacggagatgatctcggcccgggagatgttgggcgcgatgttgcgcatgaagagggagcaggtcttatgcagcggccgcggcttgcactccagccccgcggcgtccttgggcttctcccattcttcttccttgggcttctccttctccttgagcgcttcttctaggcaggaaggggggtaggaaggagttggtgcatttttattactgattgtggtggggaggatacagaagctttcccctaaaagccacccaccctcccgtcaatgtcgccaacctctcacctccccacccgcattaggagaacgcactttaaagcagaaaagaaaccctaccggcctcctccttctcctcctcagcctggccgctctctgactccgactcagactctgacacgctgccctcgtcaaagctgtcgtcaccactgtgcttccggttccgcttcttgctactctgtgtgagccacagcagaggggacaagtcagcgtgccagaaccccagccccaacactctgaccccaggccacagacacctcacctttttggcttccttctcggagtcttctttcttctcttccttgtccccatcaccctccgacttctttgttttgtcatcattagaactgtcattctcagcctatggtaagagacaaccactggggatgtcaaacctcccctcccacctttatcagagggcccccacccccacagctgaggccacaggttcattttccccagccccctacttctagctcctatggacccctacccgcccccctcccccaggctgccagggacaacactaggagacccagggctcggacctgcttgccgtcttccttcttctcatccttgtcgttggttttgcgctccccgtcccctaggcctgctccagcccgtccttcttctttcttgctgggctccccaggctttcctgcctgctcctcctcctcctcctgctccaggatgcgragatcattctccgtgcctccttccatcttaatcacggctaccaacaaagggaacagaggtcatgaccccagggccctggctcctgtcaaccggcttctacctgatccccagacacccccacccccatggggcccagatgcctgccacccctccaaatccgcacacctgcatccagcatcttgacaatggcatcagctttgtctatgtccaggagaaggttatcaaaccagccagtctccatgagggacaggaagaccctcagtcggttttgcagggccccccgggcctcctgccgacgcttccccacctcatctgggtggtacttagaccgaaacctgggaacgaagcgggggagggaaagacaaaacagttattggaagccaaggccaggatgtgggaaggggcccaggaaagacagggca

SEQ ID NO: 94262 - DNA, 13686 bp, Homo sapiens
ttaactttacacaggagtagagaaacttctttttctctgggtagatacccaggagtgggattgctggatcaaatagtagttctactattagttctttaagaaatctccacattttttccatagtgattgtactagtttacattcccaccaatggtataaaagtgttcccttttcaccacatccagaccaacgtctattattttgattctgattatggccattcttgcagaagtaaggtggtatttcattgtggttttgatttgcatttccctgataattagtgatgttgagcatttatccatatgcttgttggttatttgtatgtcttctttggaaaattgtctattcatgtccttagcccactttctgttggaatttttttcttactgatttgtttgagttctttgtagattctggatattagtcctttgtcaaatgtatagattgtgaagattgtctcccactccgtgggctatcaattctgctgattatttcttttgctttgcagaagctttatagtttaagtcccatctatttatctttgtttttgttgcatttgtgctcggtttcttggtcatgaaatctttgcttaagccaatgtctagaatggtttttccaatgttatcttctagaatttgtatggtttcaggtcttagatttaagtctttgatccatcttgagttgatttttatataaggtgagagatgaagatccagttttattcttctatatatggcttgccaattatcccagcatcattttttgaaaagcatgtcctttcccaattttatgtatttgtttgctttgtcgaagattaattggctgtatgcatgtttagagcatcacaattcgcaattgcaaaatatggatccagcccaaatgcccatcaatcaatgagtgaataaagaaaatgtggtatgtatgtgtgtgtatatatatatatatatatatatatatatatatatatatatatatacaccatggaatactactcaaccataaaaaggaatgaaataatgtcattcacagcaacctagatgtaaatggagactattattctaagtgaagtaactcaggaatggaaaaccaaacatcatatgttgttactcataagtggaaggtaagctatgagtatgcaaaggcataagaatgatacaatggactttaaggactcaggcaaaagggtggaagggcggtgagagataaaagactacacattgggtacaatgcacactgctcgcgtgatgggtgcaccaacatctcagaaatcaccactaaagaacttattcatgtaacaaaacaccacctgccccctaaaaacctattgaaataaaaaataaattaattttaaaaaaagaagtagagaaacttgatgagtctgtggggtatgccaattagcccagaatatccatgtcttctcatccctcattggttgagggttcacagacctactgtgcaagcactggggtggccaagggcagagatgggtcaaaccatcctggcctgtgtcattcagaacttcctctgcagtgaaggctctggctctctggtgggcattgatttgagacacacgaacaggcaaaggagtttgcactttaaatcactgtgtaatcatggagtgatttaaagcaggtaaattgtgcttcttctgggaagctgtacttctttttggagtctccaaaccaatccctgggaccccacaatgctgtgtgatgcggttccactcttctcagccaccattcaggtaatggtagctcttcttcctgggactgagacatgaggaacatcccccttccttgcatcttaccagatgccacatttactgaggcgagacattttctgagtgacaaaaactaccttatcctagatgtgcagataatataggaacaaacaacatagagagattcagttatkggcctataaagcaaactcagggtacggccctgaatggcctagagtttcctttagttcatctctctccttcttaacaagaatgttttccagacatcaaaatctgcctctttcagaaaaaagtatctcttgtgggcattttcatcttcctttctcatctctaccctaccacacacttctaagtgacacactgccttcccctttgagccaccagaggaggctagagacctcttccgagtttctttctctgaccctgcctggggcagcttcttcccttttgcttgttaagatcctgaagccattctgactttaggcaattatttgtcaaacacattctatgatgtagtaactgtgctagaaccttggaatacaacagatggagacatccatcttgttttcccaacagaaataaacttgaaacacagctcaactcaaatcagtagacatttgtggagtatctactgtgtgccaggtgctcttttagggctggagagagtataaggatgctttcagctgtgagcaaaagtctctaacttaaagtggctctaaaaaataaaaaagaggaaatgtattactacacaacagaggtagggctgttccagacatggcacaccagggttctggcaccacttctctgaaattcacttgactcttacatccttcatgtgttatgtcatcaggctccctcccctccatgattccaggatatttgcaaagttctatatgtcacattcaagcaaataatgtctaaagacacaaatgggacttctttgctgcatttatattttcgggagtaaggaaagctttcccaaaagctgtctagaaatcttccctgcaaatgtcattgagcagaattgtgttacaaatccatgcccaaaccaataactgaaagggagagaggaattatcatgactgatttggaccaattagaatgtaatgagcccattccctaaagcccactccctaaaggtcatgtgaaaagtggtagatctcagtttgctgagggggtcggagctctgggcaagaatctcgagagcttgtcagaagaagatggcagtggagtcatgcgttgcactggaagaaattaacaaagatctggagatgcccaccaaccaagagaagacatgtccaagctgtcctgtggtccagtgagtggcagatccacacttagatggatgcaaccttgaattaactgactagattagtaaaagaagtctacccagaagctagaaagaagggcacaaacttcaattttgcagttgttttatggatcttaaaagacattgctatcaagtaaaggaaactggaagtgtcatgtctggtagaaaaggggtgaatgatgaataaccctaaagtggcagcagttccaaatagattatttgcacatagcaattactcctccaaaccaggcaccacttctctcagggcacatgagaccatattaaattttatttactattttttgcatttattttccaattagttatgtaaaattccttatatagtctttttcatcttatttccattgagcctttaaactctaaacacactgtaatgcatctatgtaggagttatatttggttgtgctatggaatgagcattaatagaaggtccatattgtttcaagccctgctgtaaaatatgaaaagtgctcttagcattctgtataaaactgtattgttaaatatatgtgtgtagtttttgaaaaggtaaatccctaaataaaatcaggattctctgaggtaagcataaagtatcatatgtgtatggaagctggactggatgttggtagggcaaccagcagagttggatagaagattgatctggtgcctttttaaatatgattggttattccttatagtttcctattgcctgcacatatttttcttcaagtacagtgaaaattatgaccaatagttctaactattgaagtttaactaaagaagtctttcttcaggaaaagattgaagtttcttttgttatatctgctggtgctacttcatgttatcatgcttccttgtgtgttgttattttatgtgcttcattattttctaactttcatttatttatgtgatttttttttgaagtccaggatgagggagggctcctccacataggatttgcatttctttctatcagggatctgggaaattaccaacccaatattaaactgaattcatagtttgttgagaatttggtgctagagagctctatgacttgtattcagttgaaatttctcaggtaagcatattctacctctactgcatagccacattctcttgctttactaagcatcaaggcaacattttcagcagtcccctatattggtagaggtagggagcattgatctctggtttcccttacactgaaagtgtaaaccttcaggttgcttgtaatggagggtgggctgtgcctcactattagattcaataacttgggcaggtcctaggttttgtcttgtatccccctcacgttaaaaaggcaacgaaaacctaccccatcatattactatcaaacatctcgtaaaaggataggaggatggctgtttaagaagtattcattagaattttaccatttagcaaaacccaaatgaaatagtggataagtagcaataatcatcaacaactgctaacatcacaaaagtgacaattagtatatgcctcctaattaaacgacacatatgtagtagtttcatttaaaaaaaaacaaaacctgcctctgataagcctctcgatctattttctggattgcaggaaatacagggagcagcagagcatgttaaatagcataacgggaacgaaatcagtaaaatccagactgtggagagctctacaggacatatggtttcttcatccatagtaaattctgaagggaaaagaaaggaaggatgaaccaatagataaatagagatttaagagacatatcaaccaattgcaatgtatggtagaccttatttggatcttgattcaaacaaactaatttttaaaaacataaaataagagggcgagtaggaaggtaggagacaggggtgtctatggaaacaatgtgagttacccaaactcagtgtggcagcacccttctggttctggttgctgatcttccacaattttggaaaggaaatgggggcaccagccacaagagcaatccacttgccaaactgccttcctagaaccaggacctgtccacatgtccatggctgacttcataagtgggagctctgcagctccttggggcatttggtcaagactacaatgagttttggagtcagaggaaagctgaagagcacactgaaggggagaaacagggatagggtccatgtggatctgggtgtaggcttaaaggaccccaccaatagaacctggccaccagagaggtggcctcttaaactttagagttgtttaatatatggagcatggagaccaaccccttgtttgcccaggtccaaggattgtactggttggaatgaatacctgtgtgtatactaaattgccaaggattaaggcaggattagtgttcaggaagtgacatcaacttaggagtcaatcaggaaagttgtagagtcacctggaggtctgagcatgctagccacatctaagagtagtgggtgaaataacctgatgaaaggagatttatagcagtaggtttcagggaggagggatgaagaatgttctggaagtagcaatgcagaacaaggacatcaccttcctatctccagacacaagtgatgcaagcattggagggaaaagtcagccatcacttgagagggttgtgggagagcagcctcttaggagggcaagccatacttccatgagaatagaaaggtgaagagaatacttggagatgaggttgaggatattgggcattttgctaacagtggactttgaagtccaggaggcatagtcagagggtttcaggagctggatagtgagaaagggacagaatactggatgtgctgagccttatgagtattagaatgtaagagatgagaaaagcacttgagattttggggcttcttgtgttcactgatacaagcaggcattaagggcttaacaagacgaacattggtagactcaaaacatactgttttgactcccgcgggccacagcctgacaygggcatgcccctaccccctggctcccacagccacctaccggaggcatggcacagggagggcctcgcctcactgtcacagcagcatggcacagcaagatcaacttcatgctcggtgccaaagctgatggcaagaccattctaaaaggcctccagtccattttccaggagcaggggatggcagagtctgcacacctggcaggttaatggctagttagcaacctacagacagaaacacaaaaacagcatctttgccaatttgagaatttacctacatggattggtgttgctggaccttcagagttacaatgatgacttgcagggcaaagaagagatcgacagcctttcaaacaatgtagaaaaaagaatgaaagaattgagtcaagacagtactgggctggtgaagcgattaccacctgtagtttgaagaggggccatcaacagacattggtccaccaccgatgggcgcctggttgaatatgacatagatgaagtggtgtacaatgaagattcaccttattggaacattacaattctacactagaagcaatttggaaatattctcatccttagtagggatgttgattcggcagagtgatttggcatatacctgggccatcacgggcagcagcaaagcagatttcactggcaaagaggtactgcttctcagaggctgagatgggggcatattatgagaaatagtcaaactaaaatcaaagatggtcactatggtagagattgaccaaatggtgattgatggatgtaagaaatatatgcaaaaaacatgtggtgatgttgtagacaatcttaaaggaggctgctatcaggctctgatagaagactgcattccaatactgaagaggcacaccaaagaagggagasaattggattgtgtgactaacgatttgacagctgttccaatctccacatctctggaacaagattccatgtgggagtttctcagactgatttttgacccatgaatgaatgtattgaaacaggatgggaaatattttacacaggcaaactgtgtcaatctgacagaagccctgccactctatgaagaacagcttgggtgcctgtattgccttgtggaattctcaaaggagatcgtctatgtcccttcaaacttcgaattgtgggtattttacgctgtctggaagaaagctaaaccctgaagatgaatatcccttaatcacaggtgctgcaaatggcctttttcacttccatatgctgtacatgacattgaaacaagtcaggcaattgattgtgaattccttgaagttttctttttaattattatttttaattttaaaaagcaaatggcaaatgtatattttgatgagcttagggtgtttttttttttgaaagccagctgaaggatggttcaacagcacagcaaagactgccaaatgcactaacaccctagaatgtgatttttgttactttttatttctccgtgggctttgtttttttgttttggttgtgatagactttcaatttggatgtttggaggaatgaacatcattgttttgttctggagggaagttcttggtggtgtttctttcacccaatattgacttagatattaaaatgtggtgcttataagacagagtttaaaaaaaatgaatagtaatacttcgattaaaattacaaaagagacaaaaaatagttttgagtgttgtggaagctgagtgttggggtaagaagagtaggtgtctgcactttgctatagactcctgatgatagtgaggagaagtggagagctgtgtggacttggtccaagagtatggggctgtcttcagacatctgctgtggaagccaggtgtaactctgactttccagagcatcttacaaaaccagttctccaaagcgcaggctttggaaaaccttgccctgactactaaaagaggaagagcaactgacatttattctatacccattgtgtactaggcactgtgcttcttgtgtatattataaaatataaccactatagcatctgtacttagtgtgaattatttttatgaaaaccactttgctgatgcgaaaacagacctctcatgctcattaggtgtctttcacagcttgttttttagcatcacaagacgacaccctgcattgaggaacaaaagtcctgaggtgtaggagagcaatgactttagagtactgggattctgtggggatggagggtataccccttttcactccatccgcttctacaagacaagtgttttcagaagagagaaaacatttcattataatgaaggcatgaataaaactagtctgagtgctggatccaaggggcctggggccaaggtgtgtgccaggcaggaccctagaaccagaactgctttagagggcaagtccaggaaccagggcacaacatcatcatgacacaatgtttcatgtcctccaaagacacaacgttaaaatagccttttccagtgcaacctggtcttaaatgggatgtttcaggcaaaatcacaatcagggattttcctaaaggagctgttaccttcaaatgcatcaagacacgaaaatccagaagtagaaaaatcaacccactttaaaaaaatatcttccacggacaagataggagaataatttaaggaagatacagcatagcataaagaacgttgatcacgtttaaagtttgtttcatggttttctgaacttccatcacttggagaaacaatccattattctgcaacagtttaggggaggttctcaaaaaggtaaccgtttgagaactcagtgaattgccagcacattttgcagttggaagctcaaatttttataaataacatgcggggaatccagataggatttattttttaatttcacaattgtatttccaatgctggattcataggcacttccttgtcatagtagcagcacattaattttagcctaaataattatttaaattatttaactatttaaattatttaactatttaaataattattttactaagaagaatccacgaaatgaaaatgagcacgttcactaattttcatattgcctgaccatctcatagcaccatggtcacagactgcaaagcctctcaccggaacaagacagaccagcaaggaagtgtaggttcaacagcacatgagaatcataacttttagttccagagtgtctgaaccagagaggagggaaaatgagaggccaagagttgtctccattttcttctcttcacagtatcctgcatagtggcacaaatcgaactggaaagcccaagctaacaacaccgccctgggcgaaccgcctgtctccaccggctcctctgggcaggaggctccagcctgggggtgcctgacagctctccttccccggcgcctgtattatacatgtaacatttatatttctatccacacagcgttcattcagccatccattcaatcacccaggcatatttacacggatggaacacattcgcggagagatgtgtgtgtttgagttccaatcactgcagcccgtattggcgcggcgctttgtctcgctttgggtcaccaccacaggagcaacgatttcggggacggcacacgcctgtgtgaccgcttcccactccacttgggttccgtgagcgcgcggagccggaggagtcagggacgtgaggatgccctacttcccgcagcatccggatggcagggtctgcgtcggaaggcccgggagggcgacgccctccactgctgccgcggggtgggtgcgccaggcctgggtgtggcctcacgggagcgagtttctctccagccgcctggcccaccgctttggaacagtgaagctcgagttggggtctcctgcacgccaaggggagaaatgtttgtttctgacaacacaagcaaaattctctctcctgcacgccaaggggagaaatgtttgtttctaacaacacaagcaaaattctctctctctctccctctctctctctcttctctcctctctctttctccctcctcctcctttctttctttctctttttctttctttctttctttcttcctcctcctcctctctctctctctatctctctctccacccccccctcatatttggttgtttcccctctaaggggccactttcaatatctgcctgtgagcccagctgtctggccctatgtagcattggggagacagtagacttaacccagcgaagttttcttctgtttgctcttgctgtgcccaagtttcctctggacttgtcttccagcgtcggggtgggggctgggggaagtaggcaacctagctctgcctggttgctccctggaagccaagtcgaagtgaacaagtcagtcccaggcccggaaatagaatacaaaccctctttttgtccggtgctaacagagtccagcagtcagaactccctcgcgtctcacgctggacctgacccggggcgccgccaagtgcgcaacgcacagtcacagttggtgactaattaaggactgccgcccctctccttcacctgctacaaactcagagccctgacttctccagaagtacctaccacttggaggtggctctccttccccgccccctgccccagtcccacaccgcagcagcgcctcagcaccgcgacttgccggagcaccgcgagtggcgcgcgggtcccgcctcccccgcgcgccgtgactccctgcgcaccgctggtactctcgccacgccgccgcccggcactgcagcaccagggggaggaggcaggcggaggagaggaggaggaccgcagcgtgcaagccgggrgccactttcccgcccctcctctcgccgctgacacgctcagaggagtcaccactccgcgcgctgcaggcgagagtggcagacggaggcagcccggggaagcgagccggagcggcgcccgcactgaggcggctgcagtgctgacaccactcagggmaagggtstccgacggctggagcggtgagtgggggaggtgaagcgggcatccgcggggagactttcccccgctgctggatttctcttcccgactggtggccgggcgctgcagcctggggaagtttttgcagcctttcggaagcgcaactttgccccgcctgcccccggggaagcggctgcaggtgcccgctgctttgtaggcgcctttgttggagagggaccaggaaagtaggggtaaaatagatgcagtgaccccagggttcgctagggtaggtctggggactgggtcgcactttatctgggattcccagaggaggtgggtgggcagcagcggggatgcaggggccgcatctgcagcgaccgccacgctcttttttgcttgtgtggtttgaccggcagggataggcagattcaaatctagcagcctagagccccgggctgggtacctggacctataccttcatagctgccttaggctcaacttttcggcggggatccctctgcagacgtgcaggtggcgggagagcagaggtagccgcagtaagtgctgagagagcctgaaagaaacaccatgaattttcaaactctcccacatacattcccgaagcgcctgtctggcgtctaagagagagcaagagagggctggagagcaggggagcccgcggggctgaggctctttgtcagcgcctgcacttcctacgttacaacgccttcattcagcaaaaaccttttgggcgcctgctgtgcgccaggccaggcgaagcagacccgaggctgtgaagctcagaggggagagggaccaatcgcagtaaataagctaccgaggtaatcttagatggcgatgagggcagcaaaagccatcagccgaccctctgaccctttctcttagtgggcttttccccttccgcctgggttctagaactgggaagacttttctccagagcgtcgcggggagcgccccgggctgggcccacggggactgcggaatacggggatgaacttggctyggggcagccagcaccccacggcagatgaacaatcgggagcagatctgtgggcgtgcggggaccttaggcggcgcgcgggggcggggggaggggctgagccacgggggctagaggtgccgcctggacggcctgagctgggggcgctcgcgtcaccttctacgtgtgcgagtgatgcaaatgcagacccgcgaggggcgggcgggggtggcgggcgggggcaggcgacggagtctccgtctgggagcgcgcgtgtgtgcgtcaaaagctctgggttgatggatgccccgcggcgcgcctggcgcggagagcggcgacccggcggggcagaggggggcgggaggactgcggcggcgcggggcggcgaggaaagccccgcacggcctgggctggcgggcaggcggctccgcagtgcgccgcagtgccgggaaggagccgcagctaccgggcgctccccgggggaccgaggagatgaggcgtcttttaaggctcatgagagccttaaggagatgagaccgggatgccgtgatggtctcctctcccgctgaacctaatcccttcatacttagctgactgctagcgcggtagcttccgtttaattcttatccttaattctgaagaatgtggcattaatctctcaggcgttcactcattttccatggcaagttccgaaaggcctcgtgctcgtgggaagttttcatgtgaacgcctaggtgttgaggttcgtgaggttctgtagtgccaacccgttgcgccaccattctgcaggatttttggcaggaggcctggcctctaagtgaggtttaagaatgtcttacaaaacaatatgccgcattcctctttcatggcataaaaatacgcgttaaaaaacactactgataacgcattctctggtggaaaataataaatcaaatccacgatccattttattcttttttttaaagaccactttctggaaacccagtgacaaagtttttctactggctttactgaaggagcccaaatctgcagtatgtaggcaaaatgaatgaaaggggacggggttgggaaaaaagaaagaaaggaagggagggaggaagaaaagcaattatcaaggaacccagagacacagatgctagtcaccatttccccaaatattgtgttatgtcaccttgggcaggttactcaccctcttgggttcatcttccacctctgagaattgtgaaaaatagcttatactagctcttatgtaccttacagggttgttttgaagacaaaagagataatctcagagagctttggctttggaaatacaaattttccatgaatggaaaatattagcaaacaaagcccctacacacacacacacacacacacacacacacacagaattttcttttaaaaaattctagagacttttcccagcattgtttttttaatgaaatttggccctcaatgtgagcaaatgcagacagcagacttttcctaacagtctaatatgtaatcaaatgccattagctactgactgtctggagaaggaaaaaaagaagctctggatcacatctgagtgttttgttcatgtagtggagaaatcagatttatttttcatgacccaatgacagtgaaagtagcttctctgatctgagcagcagactggcctaacagcttgtagtaaaactcctattcattattaaccctatcatattccttaagtgtggaaatgcttcaaataataggatccagttcccagtctccaggagattacggcaaaggcatcataatgtgca

SEQ ID NO: 94263 - DNA, 151436 bp, Homo sapiens
  misc_feature (1)...(151436): n = A,T,C or G
gagaccctggcatggcattgaggacaatgagacctccagggtaatcctcccacgagcattacccacagtcacatggaggtgaatggcaaagccggctctgaagcctcactcagtcctctcactcagtctgcttcccatgatgcaagggaatgccacacagtgcagaacagtgatgcttggagtggccaaattggtgagatcagatcttgccgcccttgtgcacacaggctgctgctgactcaccctccagcccctttatccagttgtagctcctgcctttagctctaggacccttccactgggttccagctgtctgggtggtgccctccctcccacgttctaggactggaggaaatgggtgaccagcaacccccaccgtggtcatgtagcctggccaggccgggcagggtgacatgggccagtagcgggagtcaccacccagtggccctccccagaccccagagcggtgggtctgactgagctcagctgttccctgctgagtgtagacgtgattctgccattgctggcccttctattatgacagccaacacagtcatagttttggattaaggtagtttgagtttgcgttggggttttctgtcactttttgactggaagagtcctaaacagatatacatgccatggtttctagttgccatctgcaagggaattaaagaccccttcatttgtccccacatgctccaagaggaaatactcaggggggctgggtcccacactgtgtcttgcatcagatgaagtcaggagttgggagctgcccctatgaaggggagagttggggaggaggctgcatcttagggtctgatctgtctgggctgagccccactgatgtcagctggtttccagtgtttcactgttttgagcctgttgtgtgaatcatttgattacctagaaattgctgtgacaaaattaactttactgactatcctatagacacaaatcagcaacctctttcctaaacagcctcatttccacaagtggctcagagtcaatcgactatatagaggctgctctctcttttacaaattcacaagggaaatttgtcccaaaagacaaagcatgagtggagtacgatacacactcatctggaagccaaacgtctgaccaaagtcagtggaaatcaatgagctctcccaggacagaagctggttagctggcttccctggctgtcatggctgctgtccagatgcctaaatggatatattttgctctaagagtttgaatggcactcacccacttctgtctacccagaacactgaattgttagaggaaaaattgttgacagggctggttgctctgctttatactttgtgtgtataaagtgtaggctctgtgtgcatgcgggcctctcttccgaccataaccctgggggccaggtgctaagttcccaaactacagaagaggagaagcacagagaggttgagtaacttgctaaaagtcacagctgggaggggtggtgttgacatgttagcccaacaacccacctcaggggtccacactcttttagccatgatatcatgtagtttcccctgtggtggctatgaactgggtcagatgggctgaggctccaggatgggcccaccctgcaccacccccatgatctgggcaattcatttagtttctacaaagaccaggaccttcaacagttatggggctccaatgcaaaggtagactagagagatttgtaaatggtgaaaagccacacccagtggtgttattgtagcaagaagcactgcacagaaaaccaaataccacatgttcttacttataggtgggagctaaacattgaatatacatggacaaaaggatgagaaccatagacactgaggactgctagacagggagggagggggacatagactggaaaactacctattgggcactatgcttattacttgggagataggatctgtaccccaaacctcagcatcatgaaatatacccatgtaacaaacctgcacgtgcacccccctgaatctaaaaaaaaaaaggtaaaaaaaaaagaagcattgcagtcatgtcttgaataaggcaccggcctcccatattgggagagagagggaaagaactagagcccccaccatgtgaacaagcaggctcaaattatccaacgagtttgtttttattgagaagaagtgtatctgtggctatatggaagtaattgcatgcccattctcccagatgtgcagagacaatgtcgcggatgatggtgccctgctatttgctggcctctgatgaaggaggcaggtgctcccccgaagagcagaatcgctcattgtgggcctcacagcacccccctcccccgcccttggctgttgttctttatttacccagtgcaacacgaaaccttagccagggtagactatatgttaggtgtattttttggcttgggctaccatacaaacccactgcagactgggtgggtttacacaacagacatttatggtcttgaagttctggaggctggaagtccgagatcaaagtgtcggcagggctggttgctctgaaggttccaggggaccatctctcctggcttctggtagttccttggcttgtggcagcatcaatccaattttcacttggcgttctccctgtgtgtctgtgtgtccacattttttataagacaccagtcatattggaggagaggcccacactactccaatatagcctcatcttaactaattacatcggcaatgaccttatttccagataaggccacattatgaggcagggattaggacttcagcatataaatggtgggcagaggggaccacaattcaacttttgacacccactaagaggacatcttgcaatcactttgtcgtatctcagataatttccctgttatgcctggtgcaaactgcccatctgaaggccttcttcttccaacctgggaaatgtggagacagtattaacatattcacagctcaagtccacaccactgacaataacaattttcaattcttacccctcccagggtttaacaacacgagttggaggacccccagattcccaccagaatctggtcctctctgtgccttggggccagctccagagcatgtctaggtctctgcttcttcatcaacaaaatgagggtgataaaatctgccttccaagatgccatggagcatcaatgagaactacagacatgagaatgacatgtaaaccacaccacaccatgtatccctggatactttattaggacttcatattaggacaagcatgtgtgacagtaagcaaagggtactgcacctatgactgaacctctttccgtccaaagcctaatctgaatccttataacctcgtttgaaagcagttgctgccaatcttgccaatgattttcttttttttcttaaagagacagactcttattaaaagagaagtcacccaggctggagtgtaagatcatggttcactgcagcctcaaactcctgggctcaagtaatcctcccactttagcctcccttaaaactcatttgccgctgggactaaagatatgtaccatcactttcagctaatttttaaatttttgttgagatgaggcttccttatgttgctcaggctgctctcatgttcctggactcaagtgatccccctgccttggcctcccaaagtgcggggattacaggcatgagccactgcacctgtctgaatgtcattttttgagtgaggacaaagttgagagccaaaacaggtaaaagaaggtgccatttatttgtaaactttgcacccagattaactttatcatactttttcattttcatgtagtttgatcctttttggatattattcagcttttctttaataaattgttaggatccaaaaatataccacaccagttaacaagaaaatcttcacttcaatcttaacacttgaaaagaaaaatcttgcagactttgctcctatttggggataagcaggggactagtggatagaagaaggtgctttctcaagtcagtgacagaggttgggccatgccatcttttcagagccagtgctgccctctgagggcttcagctcaaagaggggaggaaggcaaatgaacagaaaatgaggctacagagtggtgggtatgaattttcacggaagactgggactggggagaaagcaacgagctgtgccagaaggagccagaaaggtttcagaaaggatgttctgttggggatgctattccaggaggagggaccagctgtcatcaagtgtctgctgggggcctttggtgtgagctactggggacatgggatgggaaagtgcccctactctagacaaagcctagaggtgtcatcatctgcaactattaagttgaagcatatgaaagagctgacatgtgacaactttggcccttttacaaaaacggcaattttgtatggttcaacctgataccaattccagataaaatggaaatgcctcaaattctaacctttgttccgtataacaacacgtggaatccctgagagttaatggaatccctggggcatttctaaaatagaccaatgcctgggcgagatcccttaaatcctggtttctgggagtggggccttctgcagggggcctagcctcctggtctccattatttcatgggatcccagttcctggtctatccatattgaggggacgagaagcagccgggataacggaggaggcaggggttcttgcagtggctactcctctctaggcctcctggagggagctgatcatgagagatcctcactgtaagggggatgcaggcagcccaggggccgtctgagcaccaaatgacatcatgtacttgaagcaccagcacaaagttgtctccctcatagtgaatgaatgtaagcagtggaattcgactcgcgggttttaacccccatgggccagcgtccttccctcccaattgtcctgctagaagaaaacgtttcgctctctctcgggtatccagctaatcgttaaggcaaacagcagcgccccttttcctttcatctcttgccccatttctgcacctacagcctcacaccttcttcccgggacacagcactgccaggagcccatcctggttcagttcagtacccaggaggaatccctcgggccgactcccaggactttgtttcttggacttcaccaccgccgcctccccagcacagctcccgcagcccgcacccgcccacagggtctccgcgaccctagagcttagggaagaattgccgaggggcggggggtccctcatgcgcatggaagggacgtacgccccaggcctccaccttcctcctgaccccggggattcttggacgtcgattctccgtctcgtaggggcgagggccctgggttcgcagtcagacgcgggcccctctcaaatctagtggcctggttttattgagtgggggaaggcacatattttccaagattaactgccccgcaacagggaatttcgcaggatttcagtattttcgactccccaggtgacgccaagagggtgggttccactgtgcacggtggggaaactgaggctcggaggggacaaggaaggtactcgaggtcacgcggctcctccggcgggcgggaacgcaggacgcggagttggggcgcgggctgtgnnnnnnnnnnnnnnnnnnnnnnnnnnnnnnnnnnnnnnnnnnnnnnnnnnnnnnnnnnnnnnnnnnnnnnnnnnnnnnnnnnnnnnnnnnnnnnnnnnnnnnnnnnnnnnnnnnnnnnnnnnnnnnnnnnnnnnnnnnnnnnnnnnnnnnnnnnnnnnnnnnnnnnnnnnnnnnnnnnnnnnnnnnnnnnnnnnnnnnnnnnnnnnnnnnnnnnnnnnnnnnnnnnnnnnnnnnnnnnnnnnnnnnnnnnnnnnnnnnnnnnnnnnnnnnnnnnnnnnnnnnnnnnnnnnnnnnnnnnnnnnnnnnnnnnnnnnnnnnnnnnnnnnnnnnnnnnnnnnnnnnnnnnnnnnnnnnnnnnnnnnnnnnnnnnnnnnnnnnnnnnnnnnnnnnnnnnnnnnnnnnnnnnnnnnnnngctgttccgcggctacacgctgcggctggagcaggcggccacgctgaaggcgctggccgttctcagcctgctggcgggcgcgctggcgctggccgagctgctgggcgcgccggggcccgcgcccggcctggccaagggctcacacccggtgcactgcgtcctcttcctggcgctgctcgtggtaaccaacgtccggtccctgcaggtgccccagctgcagcaggtcggccagctggcgctgctcttcagcctcaccttcgcgctgctctgctgtcctttcgcgctgggcggccccgcccggggttccgccggggccgctggggggccagcgaccgccgaacaaggggtttggcagctccttttggtcaccttcgtgtcctatgccttgctgcccgtgcgcagcctgctggccataggctttgggctcgtggtggctgcgtcgcacttgctggtcacagccaccttggtccccgccaagcgcccacgtctctggaggacggtaagtgcagccgcgcacccctcatctggtctcggacacacttgctgggacgatgctgggaatgcccggagtcgggcgcgctttttcctatgcggcgggtggggacactgaggctccgagtgggggtgtgttcaaggtcactcctacgagttggggacgcagtcggggctggcaccctccggccagggctctcttcagagttacaatccacgaagcgcccctggcgtgaagtgtggagaggggagacaggtgtggagagagaaaggtttggccaaggtcagggagctgatgagcggccagacggcggccagaggggtccgccggtcttttgccgcacccatccccacagagggactgaaagtgggcgaggagagcagacccccagggcaagctccaaggccgggtctgcgcgcagcgctgggctcttcccctgcgcacctagagcgcgtgctgggctcgcctcccaaccctgcggacccgagggtggtatatgggtggtgggaaaggacttcggctcttccagccttgctggccacccttctgtggacatgcctccggcccagaaagagtggggtttgccaaggtcaaacacagtctagtccctgccgctgccactcggcggttgccctgaccctgccttttctgcgcccgaactttgtcactgtcttcccagtcgggcgggcgagatggttgcaaggacggggacgctgtctgcctcccgcggactcttcctgggccctggaggagcctgctcttccaactgcccggaggtggacgtggaccagaggtctttgccccacggcggggctttgagagcttccccttgtgcccatctccaacgggccgcagggatggggctggggagtggggggtggggagatttggaagaccctgaggagggttttgtttctgcctctagctgcagtttagcagggggatggtatgactcaaatggagtgggggagcccatctcacgaaaggaagcagtggtgggagcaaattggggagaggtaaggggtcggaggggaagctgaatccagagagattagggaagaataactggggggcggtggtaaggagtcccacagcccggccccgggggaccagcacccaaggatctaaggaggcatccttagactgtgatgccaggggcagcacacagtcagaggagccrtgagatgctcaacctggcacagggatagacacatcactggacttgtgtcttagggtcagagagagaccaccatgtgctcaacccgtgggcaggggcgggagggaagaaggcaggagtayatggagaattgtcaaagagggcgtcggaggaagagaggaagagaggtagaggtgamgggcagaggcacaaaaggatggctaaaggctgaggaaaggggaaaggagccagaggacttcatgtcctggaggggaaggaggctcttccacagcctcctgtgggcagcacgtgggccttgccttatcagtctcagggggcattcctgtatctcctactgcctccaccccccatctgtctgtgtttagcctgggcctcatgctggcccccacagccagacccgcaaccgcaagacggcctccccaatctgaccagatgccagggcagcttgggaatagggaggggctgagcttggtccctgggcaggcccagggatcccaaccacactgcattctctcttattacaccagggagtcagctggtgtaataaaaggctgcgttattgtctttctcttttaaaataaagacatttcctatatagcctctagtcatttcttttagagaattaaagattaaaaaagagagaggggagagtctataaaggagtttctggacacagggaactctgcctctccccctgggataagatgagcccctgtgactgtcactgtagtggggaaggaagcccatcctgggagcaaggattcttagggagcagacatctgggtttccctgctagctgtgactccctgggcaatccaaagccttccctcactgagcctcaggtttctcacctgtgtaaagggcagaatggccccctgcagggttgtagtgaaggtaaacacttcctattggaaaagcacatattggcctttttagaatgttctattcaagtccacgtgtctatacaggtggtagtgatactgacaaacacatggggatcaatgcagggagacttacagtggggggagcagggcagatgattcccagggattctgctttccaattagagaattccaggagcctgtgaaatctgtccataatgagctctgcagtttggtgcttgagatggtgaagaagacagcacacgcatttacacagcattgatgtttctgctgctcttcactgctttaccatccactttctattcagacctgtgccactgtgcagtgcagtcactcgttgacagcaccttgtcctccatactgagttttgggcaggtagtagccatgctgggtgtggagtggatgtcccaaagaggatgaaaaatggagtgaatgaacgaaggaatctttgcaggggatttccctcactgcatacatagcaggatgctgcttcagagtctgagatctccacagtgatctcctggtgctgagcccagtgagttccagagtcgggttaactccatggggcaaaggagctccctcccttgaatcccacccctttctctgagacccaaatgccttcttatcaaggatagccctaaggaggcctggaaaaagcctgcgctttctgaggcctgggttcaagtccctgctctgagctatggagaaagttcttgtgttttctttccagagcctttgcccctccaaagcaaggctctcagggttccctgcagcattcattgttccagttctggtgcacagggctctgggaatgcagcctgggtgctttggggcatctggttcctctcctgtaaagcccaagctgccccaggactctggggggcagaggagagaacgctgaaagctagtgtgcatgactattagcacaggtggaattgagtagctagggcttagctcctcccccggagaagtgcttgatgctgatgtccctgagcagagaggtctttaggggaaacagccttgttcctacctgggccggcactgagggggaggtatccataaatatgtgctaagtggccagaactgagttcctttcctctcccagccccttgcttttgggtcactgattgtacctatatgacatacaattcatttttatttagccgagcacctgtcagaactgaaagcatcctattcaagacatccttggctgctcacagtcagtagcgggcaaggcctgccagggtgggctgaagatcatgggggtggggtaggggtgagtgccaaggaccatggggtattaggaaggcagagaaagggagacactggatgtctgggcttggcctcttgtgatgccactcacagactcagagagcctcagagggagcagcttggaatcttgggaaaggggggcctgggcagggccccagtccttcccacaggagtccgcttcccaccctgtgccctgcattgcctggggagaaccagggtgcagcacatgtgtgcaagaggaagacctggtctctgccagctctgagcttcctccctttgctactttactctgcacagccttgaaatacccastttttgaccagtgtgaatcaggatattgtatttttacctaatttttttctgaagtagtagggatccattgcagtgtgcaaattatatgctttcaatttcgttgcttatcaatgtaaatgaaatacatttctgttctgccgagttcttagctgtaggcaggataacagaaatcacgattatcacggagaaatgggagtcagctgaaatttccctgtgcagccccagttatgtctgagctctggttcagaaccatggcttggttgcttggaggtgaaacaacctaaccccagcacgcagaatcatagggctcaagggccctggatgacctggttgttgatagcaaagctcgtggcctaggtgtgcgctggtgacaccaatctgccagccctcaggctgtgtcccgtatgcctttgtgtgccctgtgcccactgcccaacatgctgtcaactcccagttaaccccatgccctgcctccctttccccagcctctccctctgctggccctacctcccctgctggcccctcctctggctgggccttcctccccggctgggatcctcctcccccaccagcccctcccgctgctggtccytcccctggctgggccccaccttctgtggctggcccctactcccccacggacccctcctccacttcccctcccactggcccgcttatcytcgtggcctgcagcctggtcctgtcaccatggagtacccatctgctgtgcatccatctgccttggtggagccactgcctacagcgacagggctagggttagagccgggtcagggagggtaagaggtggggtgctcctcctggcacaggggtcaggctgtgtgaaggtagggagtgggcttccctgcctcctgctgtgtggtggcctggcgacctgaaggtagtctccttgtccttggctggacactcttcctgaggtcagttttgctgctgtcctgggcatggccccccacagtgtgctcctgactctggcttcagtcctgtggcagcctcgctgcttcctccagctccagattgcccccaggcctgtgtttagtgtttagggagcaacagcaggggacawccatgcccctggaaactgccccgtcccccccttcccccttcccccctcscccccatttttgtttttctcgtaggggtgggtggtcccctggtccatttcccttcacccccaggcttatccttcctcaagggcagttaactttaacataaaaagcttccagaattgcccctgtcagggcagctgggatgagggtgagcaggaaatgagtctagacaaaagagagggagaatggtcctgggcatcgggccaggggctcccactcactccacctctgaagtggtccagtgggcccaggggcttttctctgcccctccacaatgtgcccagcaggggctgcactgtggaaggagccctagacatgtgctgagtctggtcgcactgatggaaagtgggctgaggggccggggggcagctccttcatggaccggagaagagctgggagcagacacaggggtggagtctgcagctgccggggcctccctgcctctctgctctggttcccatgaccccacggtgtttaggtgccaggcttgagcacggggctggggtaccgggagaataagacctcccttcctctgggaagctgcagtctattggggagaccctggtcaataactcacactgtagtcccacagggcaggacattcaggtgacctttgaaggtgtgcacaggggacagaccaggcctaaccacttgaggcggcttccctgtggactgggcgctcagccaggatcactggaccaagcacagggctgcaagcgagcgagagtagtggggcgagtcccgcaaaggcccaagtggggcaaaaccacactgtggacttgccctttctcccaagagcagtgctgagtgtggccaccaggaggtgggagtgtgctgggggctgtgtgaggacctgaggggaccactcagcaggctgcggtcagtggtgtccgcttgccactgtcaccactggcttttagagttgtttgcctgcccttttggggctcacggtggttttaggttgatgtccctctcctgtcacatctctgaggttgagagggccagggatcaactccttaggttcacaggttcctgcagatgcccagaaatgtccttggaccatttcctgactcagacggaagctggtgggcatgtgaggtgggtgactcttctggcatttcaggggctctagtgtatstgtgtgactttaggcttgggatgatccccatgcctcagtttctccctcaccaaagggaacagtagctcccttctgtggttttgtagaacagatacatcctccagttaatatgaatggattgtgcctgggaggcgttccctgtcctccccacactgttctgggctcagtgaagtgggacctaccccttaccgtcacttacatacatagctgtatgtagctgatgacctactagttagtctgtgacttagtaaaactgaayagctgcagcgaggcgctggtcttgatcaaatgttgggagagactcccagaatgcaggtggcaggcatagtctgtttagcccaagtgttctctgacaactgtactaaacaccctgtggaacagccccagtcggaggtggccatgtgtccgcagtggaggctggcatccctgtggccatcatgccaggctgaccccttttcagccaggtttttgagccccaagcagcatgggggctgaagtggcaggggcaatggtttgggcaggagaagcagcctgaccacctatccatgtccacataacccccttgtggagttcacacgaccacaggctcctccctttaccctgaggggctgagcaaggtaataggaagagacctttcctgctctccatttgagcatatgagttatatccatccytcctctttgcatgaacatacacaaacacacatgctcatgcataaacacatgctcatacacacacataaacacacacacatacatgcacatacccacacaaaaaycctcccagatgcatacactcacactcattctccccccaaacatgcatgcacataatcacacagaaacacacactcataaaccagtgcatactcacacatccatacccacttgcgtgcatgcacttacacattcacatgcgccctcacactcattttgtacctacacactagctcacacactcacacagtacactcacaaatacatgcatgctcacccacttatagattcacacactcacaaagcaatgcacatttgcacactgatgcacactcgtaaactaatgcacacttacatgttcatgctcacctacactcacttcactgttactaatatgtgggtcttttgagtagatgtgccatcctggtctctgagggagggcagcctgtgccctgtgtctcagcagcaccaccacagagacctgggttgaagcccagttcctgcacctccagctccgtgaccttggcaatctcagaatctggcttgtgaagggaagccaggctgccagccttacctgcatcatggaagtgtagtgagggctagtgggagggcaggcatgtccacatgggacttgggagctgtggaggcagggaccgggctaggactctaaagccttccttagggaaggsagtggggctgtctgccactcggctgtgcccctctctagtgcaggccagggcaggcacctggcggggggtggggggtggtgggggatggggtgggaggcctgcctccactgcccagtcttcctgttctccctcccagtgtttctcctctgtcccctttaacccttcagctccctgtgccctcttcaggctgatctgggctcttctctcagtggagcatggggtgtcttctgcagtattttgctaagggggtcccatctgtcctcctaccycatgtgtgtttccctctgccgtgcagagatgccagccccaggaaggatgtatgaggtgtgggggaatccctgggggcagggcaaggagaataggagcccaccgcagcagcctagctctggctttgtggtgaaggcagcacagtccctggaacaatcccatctccctggattaaagggatggcaggaactgctttgatctccaggctttagtgttcgctctgccttcagtttgggttgggaagaaagcctggagctgagaagagctgtctgcttcccagagctcgggtgtgacttcgtagagcctgaacatagctctctgggtggggcctctgtatgggcatgtgcctgtgtgcacacatgtgcgtgtggatacgtgtgactgtacacatcgtgtgtggatgtgcatgtttgtatgtcggtgcatgcccatgtgcatgtgtgcatgcatgtgtgttcttacatgtgcatgtgtttccatgcgtgtatgcttgtgtgtgcatacaagtgcaagagcattggtaacatttagaggaacctgggagcaggtggacaggatgctgccagcagtgtggtggggtccccagaagtgctgggagccctgcactacagcctctgagccctgcagaggagaaagtccatgctggtagcacattctgaatctgagcacaactttttgttttgattctaaaaatacagagcagctcttttatcagagtacagtgtttccttgtttccttctcccaagtagactcttctctgaagtagactcttcagcctttgggaagtggctcagcctgagaaaatgcagatgcatggtgcttggctggcctggcttcctggtgcttggccacctggtgttcttttcccccttctttttttttgagatggagtttcgctcttgttgcccaggccggagtgcagtggcgctgtctcggctcaccacaacctccgagtcccaggttcaagcaattctcctgcctcagcctcctgagtagctgggattacaggcatgcaccaccacgcctggctaattttgtatttttagtagagatggggtttctccatgttcgtcaggctggtctcgaactcctgacctcaggtgatccacctgccttggcctcccaaagtgttgacattacaggcatgagccactgtgccctgtttttttgttttktttttttttttttttttcagacaaagtctctttctgtagccaaggctggagtgcagtggcattatcatggttcactgcagccttgaactcctgggctcaagtgatcttcctgtgtcagcttccagagtaggtagagctacaggagtgcaccatcatgcctggctaattttattttttgtagagatggagtgtcagtatgtttcccaggctggtcttgaattcctatgcttaggtgatacctcaccttggcctcccagagtgctgggattacagatgtgagccaccatgccaggccctgagtgcccttttcttactgacatggttcgcctgattgccgtcctgctgcgtgtggcacaccctggctctggtggcccccacttcctgggagcatcgatgcttccgatggatggggaattgttgtttacacaacaggtggcgtggggcccaaggcatcacatgtccgagtgtggagatgtcaggcacccactgtggacaaagaggatggccccttcacagcagggccatgcctgggacagagccccccgctgccccctgctgtatgtctttaactgtggttctctggctggctcttgcccactagccctaaggactcacttgacctcctgtccctggacatggtccttctagcgcccttccctgacaactgggctcagtgctttctcgataaacctgtttaatactgcattctatgctccctgtgccccccacctaccacacagtctagagccaggtctagaggtcccagcctgtggccagcatctaggctttccatgtgaagcatcacctggttacactccaggagggcttctctcccagcctgtgggggcacctgtgggttttctcagctctactgtccagtctctggaagcagcattattgtagtaagcatgcagctgatgagggcgagtctgcttaggagtatggtggaaagttcaggagatgccaggcagttgcaggcctgtgccgggagtcagggcagcctgctctggaacattctgttccccagggagcatgtggcagtgagcattctggttggtcacctcggtgtgcaccatgtgccagccagtgcagcgagcctgtgctggagccatgctcagtggcaatgctcccagaagtcatgagtgcctttgccttcattcccctatgagaggaatagcctcttcttaagagaatgcattgcctttctgaaacaaccgtggcctcaaaaagggatcttaaatacttgttcgttgaacttgttttctgtgacagctgttttctcaaaccctacctgccctgcagtgtcagtgattaactgagggaacacagtttaggaaacattggcttagcctaaagattttgaaatatctctgatagttaatttttaaaaatctgtacttgcagacatcacagatgtttcatgagcactgaccatgtcctggtgctgggtgggatctcgtcactggcagggtcccattgggtgggtacatctttttttttttttttttttgagatgaagtttcgctcttgttactcaggctgcagtgcaatggcgcgatctcatctcactgcatcctctgcctcctgggttcaagtgattctccttccttggcctagcctcctgagtagttgggattgcaggcatgtaccaccacgcccggctaattttgtatttttagtagagatggggtttctccrtgttggtcaggctggtcttgaactcctgacctcaggtgatccacccacctcggcctcccaaagtgctgggattacagtgtgagccaccacacctggcccaggtgggcacatcttttatgccaagcaccttggcttcagtttgttcaagggtcagaaatgggcagtgcctgagagctcagctgatggtgtgactccttttggctggtgtcacaggtgctgtgggtgggtgggggtggacaagctggaagtggcgctgttctgaggttctggtgttaccctctctgggaggttcagatggtcaccgtgtcattcattgatcttctgggcagggatgtgttgagacacgtggggagcggactgtctttgatgggagctgtccccagggtgctctaccacctgggggcttgcatctgtcttcctgacttccctgccttgtgttcctcactttcctgctggtgtccttatgtcagattctaccagtgctttttcctttctccctcctaagctgacctcgcgagtgtgcatgacctgggaggagaggctgggctgtcttggagaggggcaccatggaggaacaggctgcatgcggccctaacacccccttggaactgaggtgccagtggttacacaggaagcaccaaagacggctgcttctccaggtccccgtgagaatcctttcccaggtctgttgaacatagcttcacgcattagaaacctgatgacgggagctcagggagagcctgtcaaattattttttaaaaaattgtgttattttatttttattatggaaaattcaaatatacacaaaagtagagagaccagcacagtgatttcttgagtacccatcactggctccaacaattatcagcattctgccggccctgtttcaaatgatgctaattctaaaacgcttttattaattcaaacaccagaagctaacaagcaattacgttaatttaaaaacccacttgtgtgagacactgaagaagcagccatggtttaaagagaatgatgtcacaccagcactcagccgctggtgagcaccatggagggactgagtggtgtccactgggggctcagtcagggagggggacagagggaccactccaccatccagacacctgggagrtggcaggctgatcgcagtctgggaatttaccaatgagaacatgcccagtgctgtgcagggagcagttgtgtggagtcagctcctttgctggcctgtggcccaagtgctgttggttcatatgagaaagcactccctccagcaggccccccgacctgtgcctgcactcttgctctgctcaggagaggctggtttggaggactgtcctgcagtggttctcstgtccccatggatagtctgaatgccacccaggctgagagactgtgctggggcagcccgggtgatgtcatgttgaaaatgggagcaaattcaatagagaggttttcatacccaataggagtgatcctggggtgagaagggaccacccagaccagtccagggatcaggaggctgctctgtaaaaggagggaaacccctctgggccaaggtggcagtgagggttgtgggtctgagagcatgctctgcccagagctgtggcatggccagggcgtgtgcttccatgtatgtgcatggcatggcagacaggtcagaggtgagtccagggctcagcgggtctcttgtgtgccagggaggtggcgctccatccagaatctgggatgatgggagggtctgcctcacggggactttgactacagcctgattgtgggttgtgtcaggcggtggggttagagagaagttggtggcatagggctgtcaggggcagggcctgatgaaggcttgagaaggacagagagagaacgtcagaggacttgcaggtttggcttgggcagtggcacctgtctctggaggggaggaaggacaggtacctggggatgtgggatgatgatgtcaaattgggatactttctccaaggactatgggacgtcttgggttgggggaggggcccagggctcctccagggtgctagtctagtgaccacgagtggtgtctagcatgagggatgctagtccagtgaccctccagtgtctgatgattttctcatggttagactggggtgttggttttcagcaggaggcctcagaggacatgccctcactgcattgtgtcagggcacttctgtcaacaggactcatcatggccagtgctggcagttaccagctggctaaggtggtattggcaggtttctcctccgtaaaggttttctctttacttttccttttccattttgtgcttttccaaaggaagttactgtgctgagcccatactgaaggagtggggagtttaccttcttgaaggcggagtagctataaatgatttggaatgatccaaatttttgcctattcatctgttatccttcatttattttttatttaatcattgatttatattagtactgatgtttattttatactttgggttacaattcaatactgctttgtgttgctcaaattgttccaactttggccattgggagctctttcagttggctcctgtgtcctttgatacaccccctccccatcatttgtgtgtgtgcgtgtgtgtgtgacacttgctttactttctggccctgcaaggtgctccaggcccatctgcttgattagcaaatattttctctgcctgagcccaagaatcagtcatttctccagggagccccagttccttttattggagaattttattaaagaccattacctggcctcctcatgtcctcgttgctcctggggagccattgcttctagttttctctcattaggcagagctagaacatatatgtgcacacacatttctataaacgtttgcatatgtacccatctgtgaattaagtcaaacacgagttcatcctggtgcctcagagtctaacctgcctcccatagtgaggggctggccctggtgatgttttcaggtggtgcacagtcaagtagagatgccccagggcctgcggacaggtcctgctcctcctggctgccttttccgagcatgctggtgctcagtctagcagactccctgggaagcccttctcttcccggctgtctggctgagttaatctggcccatgaagatttcttcagggtgtttccaggtgctggctctttggccattgggggctctttcagttggctgctgtatcctttgacacacccccatcattgcgtgtatgtgtgtgtgtgtgtgtgtgtgtatgtgtgtgtgtaacactttccttactttctggcactgcatggtgctccaggctcaccctgatgcctcagagtctaacctgtgtcccacgcagtgtcctttgttgggtttctccttaggtctctttgataagctcatttgggaggtactacagttgtcaccaatctgcccatctggtggatggagagactgagccacagtgatggtgcaggcagaaggcagggctatggcagggtctgaccctggtgaggacacctggactcctgtcctcgctcgcagcccagcacagcccttgctgggatgagggcccgagagggtgtccatactgggagaccagcagcctggtgccacccagggcctggctggtgtgggcagcatgtggctctgggccaccttgtggtcagggagtgtggtggtggtgtgcagatggcccgggccgggccggggttgggtctcctgctccaggagtggccagcgggctgtggtggggaggccgcctgtcccccaggcccctgcagccctcatctctgagtagctcgtggtgacccgagcctgcctttcttgtcattgtgacatgtgctaagccacattacaattgccttgcccctgtgacatgcatcttttggatctaaatgcccctctagccgtgagttcagagagcttcatggagagaatcgagagttccagaccttggggacaggtttggaactctcaattccaacacagtggatgcatttggtggttgaggatgctcatctgggaaaatgcgggggcgtgggtgtctcggcgggtgagccctgtgctcatgggcaggtgtggggcacttggcagatgacacccagccctactgaagtgtcctttctgcagcagtctcttctcaaccaccctccaccgtgggttttttttttgaagggaggcagtgcccagctcctagaggagtgggttgtttgatggcgcttttcctttccagggccacgggggtctgaagcttccagtgggagtgttggtttcactggtgacagtgcccttcagatatcccaagggcaggtagtgatggttcccattctcgtgaggacagattgtagttaacagaaatggggaggcaagctaacgaaaagagaggagtggctggttccctctgagaaagggttccttgggccctgggagggcttgcaggggcacctccatatagtgcagagatgagggggaccggccgccaatccccccagcctccacgggctgctagcccacacggaacagctctgatgcaaacggggagggtcggtcatcttgacaactgacccgccagctgtgctatgtccccacccccccatggactccttgtcataaacttgtaatctaagcccattgtgttccaggaggaaaccaggggagaaaggaagctaacatgtggaaaatctccaaggaaggttttgttcttcctaattgtcgtttttgttttaagggctggggtccacctgccattcacttcctttagaaagtgggtggtggcctcctgtgcaggctcctccgcaggccttgctggcttagctctggcagctccagtgccccatgtgtccgatggcccctgggtcttccagctccctgctctggccctgacccttaccagacatccatggtgtttggtgattctgagcgctgaacacaccctaacatgctctgcgttttgtttgtggaaaaagccggatctgagtggtatccacaccatgatgacagctctgtcaaatgcaccgagagggaagctaaatggccgtgttcaggtcccatggagatcttcagggtcatagtggagatttcaaggtcaccttcttgatgctcagggtctgggagagaccatcctattggatgtcttgctgccttctctgacccctcacaggtgacagccatcccgtctggcctgcagagggtgtggtcagggtggtgctgtccagcaggggcaacctcctgcctgtgcctttgccagtgtgtggtgtttaacgtcgtcagccccacagggtcaggtgggggtgtgtctgatgtgtgtggggagctgtgctgggcgagggtcaggtcccccatggaggtgtcaggcagaggatggctgtcagctggagccctgcagattcgtgttccttgtcctccctccctgtcacctctttgagagtggctctgatgttgtttccagattgcatgtgaccgttggtcctaggtttgttttccagcctcctgatggatgtgcctttgaggctatgtcatacacctcaggtttgaaggtgctccaaatctgtcctctcccctccctgtggcccctgcccctggtcagtctcagctctcctacctgctcctcagccccagcatccagtaggtggccaggagctgccaggtctccctcctagagccgtctgggggtcccatcctgctgcctgtagcttggcccgatcagggtgacacccatctgtcccgtctcatgggtctacctcctggactcgcttggtccccgtcaggtggcagctgctccccacactactgtgtgagtttgtttttgattttagttctgtttcatagtgtgcagcacacattcacatgtgggggtgtttgtggttaatctgtgtggagcagtgacagccggagcctgcaggtttctgctccctgggagacaggtagaaatgcctgggcttaatcagacatagaaattctccaattttgcgagtgaccaagggacacccgtttcatacaatacttacaaactgcagcccctcttcagggcctctggcaggacatgccatggccctgcatggctcgtcagagttgcctgtgtccagacccagtggtctgcaagacgtagagacagatcaratgaggagaccggcagcaggcagtggggagtgggaagtgattgtggaggggaaccctgggtcaggctggccccaggtgcctgatgcctgggtctgagcctggttctgagcctggagtgtgggtgcactgctagtgctggctccttctcaggctggccccttctttgtgtctcatctgttgaagctgaagtggggacaggactaagggagagtgcagagaccgggctctggacactgcgtttccccatcttgtgctggtgctcactgtgtccccaaatcaacatctgggctgttttcgttttttgtttttttttttttgtgaactcacctttcctgaatctttccagaggagtttgtgcaggctttgtgggaacagccactctacacatatgtattctccaggggtcttggttttctgaagctgctataacaaagcaccacagactgggcaccttaaacaacagaaatggagaatctcacagtctggaggccagaagtccaatatcaagctgtgggcagggctgggctctcctgagacctcrttcctgggctacagacagcygccttccctctgtgccctcacagagtcttcccgctggctgtgtctgtgtcctcatctcccttcttataaggacaccaggcagattggattagtgcccaccccgatggcctcattttaacttaattgcctctgtaaagaccctgttttcaattagtcacatcccgaggtcctgggggttaggrctttatgcattttgggggacacagtttggccttgacactaggcctggttactcctcatcccctgacatrctgtctcacagccgcccggacagggtgaggacgagctcctgcccggctgactccctgtgtccctggccctgcgctgtgggtttggcccgggcggcgtggcttttggagagctcttgctatgctctccgggcggcctaggccctctttgtgtgtgtgggatgtcaggctccacatgttgcctccttctctccctgcagctcggtgccaatgccttgctcttcgtcggtgtgaacatgtatggggtctttgtgcggattctgactgagcgttcacagaggaaggcgttcctgcaggcccggagctgcattgaggaccgactgaggctggaggatgagaacgagaagcaggtcagtggcttgggccagtcagcctagaggggttggctgtggggctggggaggtggaagaagctggcttcctgagcctcagtttaccccgtggtgacatgggccacaattcccaktggtacatgttggtatttgaggctgtggaggagatgccctgaggttttatagttagcaaatggacrggcaggctgagtttgctgcccatgggatagtgttgggatggggctgctttggggacagcatttgggcgcacggacttccggttgcagctggaataggtcagctgcccagggaggacgaggcaggtcctggctgggcctcggatgaatgtgaccgtgcaggtggccctgatccactggcctgaggcttccaccagctctgcccttggctcagtgtggccgaccccagagcacgctggcacttctggaaggcagagatgcccttttgctgggagttgtagaggggtcacagtggtcatgatacagcacccacagcccttggggttcctccagtggccggcatcaccccattttcaggatgaaacagccgcgagggaaagagcagtggcttggaaggagccatgcctaggttcccaccgccctctatgacccatcttctgtgctctctgtctgctgcgcggggcctgtgcccagcatgtgggcttaggaaggaccatctgggagcccttgggataagcctggcacattccaggtgccttcactggaaggatctagattcttcccctagccttggggcttacaggcctctgtgacaccaaactgctcatgtctcaggcctgtagctgacatataggatctctttctcaacgatgtgaatataaggtattataccaaatataaatgtaaaaactcacaaacacatttcatgtgtcgacattatgatccctaatagttacaataaaagtaggatatacaataaaagtaggaaatagatcacatatgtatgtttaggtggtgtgtgcattgccgtctatgtgaacacgtaggagggcgtgtccatgtggatgttatgtgggcagtggtatgtgtctgtgtatatgtacatgtgcatccctgtggagatgcatgtgtggatatgtgcatatttgcctttgcctctgtacatgtgtgcatgtgtgtctgtgaatgcctgtgctcgtgtgtatgtgtccatgtatgtgcctatctgtacgtctgtgtggttgcatgtgtgtgtggctttgtaatcaggtagatgtgtttgcgtgggcatgcctgtatgtctgtgtgtgtatgtctgtgatatgcagggatatgtgtatatgtgtgtatgcgcatgtgttgatgtgttgtctatgtgtgtgcatgaatgtgtcggtgtgtgtataaattgagcatctttcaaggctgaaccctgagcattttctcttagaccagagtcagtcacacaaggagagatatctcctttgtgctttctgggaggcatatagccttattttgttaccaccataagatcccagaaatgaatctttggaagccctgttctccccttaactacatcctctgtagtggagaaggcaaaggctctttttgtgggccctgcttgtgtgcatttccttttcttttcctcttttgtctccctcccatttccttttccataccttcctttcctacttctgtgttggtcttttttcatttattttctgacacttgctgcctttcctaaggactctctttcctcccagtattgtctagtctagcctttgctgcttgatgtgcagcatttcactgggttttatagcagctctgtaagcaaggaattttttcctcagccctatggaggaggcagtccacactcagggaggctcagaaatgtgtccaagttctaactgcagagtggatgttcttaaggaggacattttcaaaatgtcacccaatccagttaacccagccaaatgctatttagtgttcagattttgtctttatgtttatttttccccacgtgattgtcattgtggtgtatatataattttattttctgtctttttgcttatcattttgcacagacatagctactggtgtgataagtgtgatttaaaacatctgcttattcttccccttaatgcatgttctgcagtgttctcagtgtctgacatttagataccacgttctaaaagagttttttcttcacgcacatgaagtattcactgagtaacatttttagcagtgtaaatatgtcatttctttcccaagtttctgaggtattttcccaaacttgtgctcttttacatctttataaatgatgtctgcttatactctgctctctatagcagccaaggccaaccactgcatcagcagcagtggggagcctgttaggaatgcagattaccaggcctcacccagccctgtaggtgggaaagcccctagggtggggcccaggggggttggggttctgatgagctgctctgcagtccctgtctttctcccgttctccctctccttctgcctattggtttccaactttctccctccctgcctccctctctctctgtgaggacttgtcacctcctgtttcccctgcccctttccgtttactaaggctgacggcgactccttcatgcttgttcaccttctgtatttctttgtgattagtacgcttcaaccctccgtcccgttacattctgactttcctggcagtcgggtgaacttctcactgtataacagagacactgatgcctcatccccacgtttccccaggtctgttcctccagctttgcttttccttgtgtaaaattcaatctcttatattttcaaatggaaggatcattttctttcatgatttcctctgttgcttcatagctgagctgatgttttgacacatgagcgctgattgaggacgtgccttccctgactttaccaagtatatcctcagacctcagctgtcctgacttttgctgtattttttctgtcgattccctttgagcctacagggttgtatctcacaataactgtctgcctagatgggctggtaatcagcacccaggttcctcctggctacctgctgyctgatgtcagtgcagggagccttgtctctttgggatggcagaggggagcacttggggcccagtagggccctgccagctcttgggtctctcagctacacaggcactttgcccctcagcatctgcctggagactgcctggccatccagagagcctagaggtggccatggcagccctgcccaggcctcatgtgtgtcagcatgaaacgccagtctcctgaatgacaggtgagggagccttaccatgtggctagtcgtgagcatctgcctttcatgttttaatttcattcatgacacatttccattcagcacctgttcccagagccttctccagccacttgaactgtccaggcaacacaacgggtgatgggagtggattgggggatgcactgaggttctgagaggggatatggggggatgtgacctgattctgtggggggatccagggagacacayctggtcctgggagaggatctgggtgtggacacaccccagtctgggagggcttctgggtggatggatgtaccctggtcctaagaggggatctgggggacacaccttggtttcgggatgggatctagaggggacacaacccagtcctgagagggattctgggtcaatgcaccctggtcctgggagccgatgtgggcatcactggtaggaggcggtggaatgccgggcacgtccagagggaccagaagatgggggctgagtgaggtcaagttgaggggaggcctgtgggcagactccgagccttacgctcccatgcacggtgtttgagggaaatcatttcatgtcctgtgacctcagctggaaggagatggcttgaccggtagagagtggggcagggctggctcctgtggttctgtgctcacagaggggagctcctgagcctagcaggaaagagacatcatgaacacgttttgagggtcagtgcacaggtaagtgcgtggaggcaggggagcagacacactggggagtttggcggtggttttctttttgtttcttcctgggggatgaatgcataactcagaggcactgtggtcagtggctttgtgagtagggagagcattgtgctcagttcacaaaataggagtttggctcaggaggctcagaaaacacctcccagtgtggacaggtctgcactttatggcccccactgaatgcctgggtttgcaggagagcacagcagggtactgctgttctgaaatgcaaactcccaatattaaaactcctcatcctgtcccagctgaaccagttttgttctgggatgggaactgatggaacagatggagatggctgcagcagcagtgcccttgcttcgagcctcctggcagtgccaggggtggaggccaccggctttcacgctcttctccactctgtttacgcattggatgcttctgttccccaatgccagatcgttcttgccccgtttgataagttatgttttgacaccagtagtagggtgtgcttcatcttaagccctggggagcacctctcaatttcctggcttatgatgccagtgttggcttttaccagccgggatgcatccctgggtgctctgtgcctacttactgctaacttttgcagcaacccatgaagagggtgacaacagatacagacactaggagctttctccttcccctcctgtactgtttagtgtcaatagccctgcgggtgccctgcagaatctttgaggctttaagggtctggtctgctcctgccgaggcaggtgccagtctcaaggggtgaggcttctgccaacattcttatgaggggaaatattacagtagctctcactctcctcccgtccaccttctcagggcagcccatagaacaagaggctctggagaagggtggggtggggatgggggcttgtctgtttcattgcactacttcctgtctgtctggaaagttctctgctgtacttaggaaaggtttacctgaattgtcagtgtgcctgaggctgattcctttggggggatttgaatgagctaaaatgacccctcctctcaacacagcaaaacaaagaaacagaacaaagggtcaccctgggcccctgcccttcatctgtccttgcctgcagggtctgggcagagaagaaggtcaaggtactaagatgttctttctgagttgtcagatctctttaaaattaatttcagccctctatatcatggttaggaatgtaaggactttattctgcttaataaatctgagaactggggctctgaaaatttaaataacccaggaaagataacggagcgaataatagagtcaccagtggcagagccagggtgagcccgggatcttccaagggaaccacatggctgtttcctcctttcgtggccacagatctcctcagctaaaaaatgctcacacagatgttttaggcttacaaataactgagctaaaatgctycaaaggggtgtgaaggttcttttaacagagctttttctgtttctgaacaaaaatgtcaaaagttggttctttgaaatagaaaagcattaaagagactgatcaagaagaaaaagagcagacacaaataaggagcatgagggatgagaaaggctgcagataaagcagggattaaaaatagataatagggaaatgctgagaataattttatgccagtatatttgaagagagacaaaatggccaaatttccagaaaaagtgtgagttaccaaagatgatccgcaaagaaaaagaaagcctgaaaaatcctataattattaaaaagattgattcagtaatttacaagctcatcaaaaagtaaacagcaagcccagatggttttacagatgagttagacagaacttcaaggaaaacgcgattgcaatttgatcagtcacagcatagaaagctcgctctctgagcctaggtcgagctggctggtgattatggaggacggagctcggattcccacatctcacaaaggcctgtcacgtggacggcaggaaaagcctctttctcagtcttgttttcattagtggtttggcttcttggtgccgaagtggattgggtgggcgtcaggtggatgcttggtccctgccctgctgctgtttcatgcaccaggttctaggagcgaggggcagggcatgctgcctggtcggggtgacatgactcctgtgtgctgtcagccccctgccattgccaggacacctgtgcaagtggaactgaggtccagggtgtttgtggtcagcatcagaggctctagaatgctcccagctcccaacttgttggtcatatggcctcctggagcagcccctgcccagcctccttcctgccttgaatgccagcatctcttctgaggaccgtcaaaagtggtgtcgggggcatccccctcctgcgtggatgtcacacatctggctccatgctgaggcgtcttgttcccctgtggctggcacagcccactgggttcttcagtctccttagctctccaggagcactacattgggcccctcagtcaccgccttctgcttggttttcgtggcttgtgcgtcacagtttgctctgtatcagctccgggaatcccagagtctcctccctgtcattctgtggccagtgctgcaatattgctgaggaagatgccggagctggttgtcgccttggtctgtgggaggctctgcggcatgtcctsgggggctgtgaggaggtttgtgggtacccagttgtttgccatatctgttttttttttttgaggcagagtctcattctgtcaccccagcttgagtacagtggcgctatctcaactcactgcaacctccgcctcccgggttcaagcagttctcctacctcagcctcccgagtagctggaattacgggcatgtgccaccacgtccagctaattttgtatttttagtagaaacggggtttcaccatgttggtcaggctggtctcaaactcctgacctcctgtgatctgcccacctcagcctcccaaagtgccaagattaaaggtgtgagccgccttgagcggccttgccacatctgtctttttcgtactttgtttgaagtctgtgtggcagatggaggtggtggccaacatgtggctcctggacacactggtcctcttggttctccctgatggaacagcccaggctcagaagccacatgccaagatatagagcccaggtgtggccgggagaggaaaggtccctgagcccaccagggcccacctctgtgctggtgaggacatgcgatctgctgtgctgtgggcatctggtggtctatgagggagagggcagatccgctgcaaggagtccagcatctgcagcctggctctcagatgattagggaactgggcccagctatgtctagtatagtgacatgaagtgacccatggaggggacctctgacagggtgagggactcagcacacacagctgcaggctgcagggagctttgcagtttcccactggcctttcctggaagagcccgaggagcagagccacaagtcagggagagcagccatgggaaggcaggctctgaccccactcgctgaggaagacagagctgagagagcctgtctggagtaaagtggcccgttgggacagcacgtcagttagaatctggtttggctgctagtaactgacctggaaaatggtggcttaaacaaaatagaagttgtctgtctcatgggcagaagtctggagggaggcagcccggggctggtgtggtcagcttaggctgtgtaacagagactgggtggctgcaacaagagaaatgtatttcctcacagttctggaggctgcagagtccaagatcaaggtgttgtcagggctggttccatctgaggcctctctccttgacttaccgatggccatcttctccctgtgtcctcacatggtcttccctctgtgcgcacacccttggtgtctctctgtgtctcctgatttcctcttaggaggagaagaggaatgcagccacattggattagggcccactcaattacctcattttaatttaatacctccctaaaggccctatcttcaaatatagtcaccacattgggttttagggcttcaatctatgaatatggaggggagggtcacaatttagtccatagcagccactaaacaacatcttattttatttcaaataaaagtcgagtgtatgatttaaaaataaggagatgctgcgtgtgagtcctggatgagtgtgcctggactggtgagtgcctggctctgggctccctggatggctgagtgcaaatagaagtacatatggccgcccctgtgcagctggtggagaagcaggcctgggctggggggacggtcccttcctgctgggtttcctcccttccccccctgctcttacttgaactgcatgtggcaggaggcaggagaggggatcctgccaggttctcagctggctctgatggactgtggctgggcagctccctaactggctccaggcctcagatccaccagccctgagtgtggctggttgtgggtgatgaggggcggtggtatccatacctgagcgcactgcacccttagcctgctcctctgatcagggcctgctgtccaccctggaaggagactccttttcgcagtactgccacaactttagaggccattattgtttgtttttttttccagtcctccttctggtttgtctcgayggtgattttaccttgtggagcaatggctggtagaggtgcagtcatgagtcctcattaataggtgtgtagtgaatgaatgcaattgagtgtgattggggaattgatcctgtagcttctttggcccagtgctcccagcggtggcctctttgtgtgtgcatctcatacacatgcttttgtgaccttgctagtgaactcgggatgagaggtaggggtgaggacaagtggagatggccctcaccttccagacatgtccagcctggagatggtgccaggagaagggaaggggcctgaaaccctccagcagtgtggatggaggacaccatggctgagaacactaaccaggcttggggcagggcagaggacgccagggctgctctggctgtagagatgctctcagaagtgaccagtgccagggcttcaggaggtggccttgactgaaccgaatagggacgtactatggggaagaacaagagtgatcagggctttgagggatgtgtaggggtttgccaggtagaggcagggaggtgggaactggaggaggcattcaggcagcaaattgaggtggaggtggtcacaggtattacttttggtaagcgtgagctctgccttccttctgcttggagaggaaggggatatgggctggaagtgcagctccactgggtggtgaagaccacttgggggcttcagggtgttcatggtcccccacaagggtctagcctgaagtctgtgcctgtcgcagctggagagcacagggtgagaggcataggaggtcaccctcagcttcctcctccgctgcctgcagcctgtccaggaagccctgtatccctgagttcagctccctcttccatactatggagctggcccctcccagagccctggctgttcctcagatgccattattaaatcagaattccaaaaataatatgcagctatttaaagcacacactcaatttgttaccctaacaaggtaaatggaacaattttgagttctcatcatgtgaagaaatttatcaagagaaagaagacttccatttaagtgatgcagtatggatttttaaatggggctggccaatggacagcaccttctcaaacaactaccgttgtgatttatttttcatttttaaatggctttattgagtttatgtaccataaagttcaattaaataaactttgtccaactgaataaagttcactcaaatgctttttcctatagagttattattatttagaattatgcaagaatcttagtcttattacacattaatcttatttaatacatatgtcaaatgatcttattgtagaaaattagtatacaataatctaaatttaggatatttttattatcccccaaagacacctcatatccattagcagtcactctccatgtatacccacacctgccctccagcaagacataggcacccactaatttactttctgtctccatagatttacctgttctggacatttcatacaaatggaatcatataataggtgatcttttgtgactggctctttccacttagcataatgtttttgaggtgcatccagatcatagcatgttttagtatttcattcttttttatggacaaataatattccactgtatggatggatcacattttgtttatctgttcacggctgatacatatttgggttgtttccactctggctataataagtaatgctactataaaaaatcatgcacaagtttttgtgtgaacacattttcatttcttttggataaatacctaggagtagaattgctaggtcttgtggtaactctatggttagcattttaaggagctgctagactgttttccaaagtggctgcaccattttccatccctaccaggagtatgcaaagcctctagtttctccatattcagaatctttttttttgtttaaattaaactgtttttattttgaactacttgtagattcacatttagttataagaaataacacagagagatcccatgtgccctttacccagcttccccagtggcaacatctgcagaactgtggtacaatatcacaactaggatattgacattgggacagccaagatatggaacatccgtcaccctgaggatccctcatgttccctttaaatagccacatccacttccctccacaacaccttcattcttaagacctgggaatcactaacctgttacccatttctttaaatttgtgatttcaaaaaatttatataaatggaataataaaatactgtagacatttgggattggcttttttttcactcagcataattatttggaggttcatccatattgttgaatatatcaatatttgtttctttttattactaagtggcattctatggtgtggctgtatcacagtttgtttaattgttggcccattgaagaatgtcttggtagtttccagttttggcctattaggaataaagctgctatgaacattcatgcacaggtttttgtgtgaacataggtactaatttttctggctcaaatacctaaaagtacagttgctgggtcatatggaagttgcctatttaggttactgagaaatagtgaaactttcccagaatggttgtaccatttatgtacccagcaacatatccatgtcttttgcctactttctaactggattttttaaactgctgggctttgagagttctttatatgttctagataacagtactttttgggatattttgtttgtgaatattttctcaaaacctatagttgatcatttcattcttttagcagagtctttttgagagcaaatatttttaatattgatgaggtttaattcgccagtttttccttttgtacttttggtgtcaagtctaaagactttttgcctagccctagttcttatgtgtttttctgaaagttttatcttttacatttaaatctataacgtattttaatttaatttttgcataaggtatgaggtttaggttaagattcatttttttgtctatgaatgtcaagttgctgtagcatttgttgaaaagactacccttcctccattgaattacttttgaacctttgtcaaaaatttgttgcgcatatttgtgtgatctatttgtggattctagattctgttttattgtcttatgtgtttatctggcaacccacgtcacactgtctggattattgttgttttataacaagccttgaaatcaggtaaagtgatttcttttaccttgttgttctttttcaaaattatgttaagtagtattattccttttcctttacatttaagtgttagaataattttgtctataggtactaaagaatttgctgggattttgataggatttatattaaaactgtatatcaatttggagagggttgacatctttactaagttgagtcttccaatccatgaacatggtatgtctctccatttatttagatcttctctgatctctttaatcagtcttttatggtttttaacatacaaatcctatacatgttttgttagatttacacctcagtatttcatttttgagcaactgtaaatggtattgtatcttaaatatcagtgtccatgtgtttattgccagtatatagaaatgtaattgacttttgtatattgatcttgtatcctgtgaccttctgaacttaattatttgttctaggagtctttttggtacaattttcttttgtttctgcttttgtaacatccattgtatttcccatgtagaccatcatattacttttatttctttctttccaatctgtatgccttttctttccttttctgaacttactgcactaataagaccttcccatgagatgatgaatatgagtaatgggagccaacatccttgccttgttcccagtgaaagcattcaatgtttgttaggtgtaggctttttctgaatattccttataatgaggaggaaattttttttctattttcatttttctggaagttttcatcataaatagatgttgaattttgtcaaattcttttttggtatcaattgctatgtgatttttttttttattctgttgacatggtgtgttgcactgattgatgtttcaattttgaattagcattacatccctggattaaaccccatgtgtttggggtatatacttcttgttgcatatcactgaattgctatcttgtaaaagacttttatatctatgtttctaaagtgcattcgtagttctttatttagtcattcttatgatggttgctttacagtctttgttggttattctggcatctctgtcttggtattgatgtgtgttggttgtctttgttcacttgatgagcttgttctagttcttggtatgatgagtgatggttcactggaacctaggcatttggaatgttgtgtatgagcctctgtatattatttggacattttgtttttgatgattttctgtgacatgactctggttgggaaaggggggttgctgtctctttactgccaggtggggttagaagtttaggctccacactgggcctctgttgacaccatgtggggagggctccttcttactgctgggcaggagtgagagttctagtccctcatggtccccgctaatagtacctggcttgggggaggagaatgagatccccttggttcccactgactctgcagagttgggggatgcttgttaccagcaggtggagagggaaggcttggctcactctgggagtgggtgggttgattgggggccccttcacagcctggggtgggggtggaggtctggcctctctayttggcctttgctggtgtgggtggggttggggcacagagttttcagtgtctctggcctggagtaggtaagttattgtctggaagttttcttcttgtgaggttgcccagtcctggssctttggctgaagagagctgcttttgttgtgttttcctttggtctgtgcctattggtattgctgacttgcccacttctcaagcactcagtctggcatatatgaggctaaagaaacctcaggaactcacctttatgtcatttcttggtttcaagatttctgccttcttccctctgacttttagtcttggttgtttgatgtgtaacatccaggactttcagctgtgttcagcaggaggaatagggaaaaatacttctccatcttcccagaagtagagtcttcacaattgtcactgaaaatctagttttttttaagagtacatttaagtcacattttgataatcaagataaattcgttaagatttttatatagcctttataggacactgaggtactttgtatgatccatattcatattagcttttatacttttgatttctggctatttaaattattttgttggctagagcttattgacatatgatctgttcttgacactaatgtttactgctgcttgggccttgagggttttgagattggatgtgaatttcacgtggaatctttataatgtgaatgagctacttcgtctttttttttttttaatcagaaatgaatgctgagtcttatcagatggcagcttgcttcctgtgggaaaggttttgtactttagtctgtggttattaacttgcattggcttagatgctgctgctaatccaatggacrgagctaatgctgagcccttggttagaaatgcagttgtccttaggaacgtcgtgtgacagtggcttacagaagtaacatagctctttttgtcttacgtatacattccagggtagrcactttatggtggtgcggcagatgtgatccatgaaaccctcagctgtctccatctagctcgccacctgtgtccctagtgtgttgccttcatcctcctaaaccaagatggtaggtggagatctggctgttatgactgtgttcccaacaacagcaggagaagaagggaagagggacaagctgttttgttttttaaattttaaccttcattttagattgagggtacatgtgcaggtttgttacgttgatatactgtgtgatactcaggtttgaggtacaattgatcccataacccgggtactaaagcatagtacccagtagctagttttcaacctttgcctccctccgtccctctctcctcctttttggagtccccagtgtctgttcttcccatatttatgtctatatgtatccaatgtttagcttccactcgtaagtgagaacatgtggtatttggttttctgtttctgtgttacttcagtggcctccagctgcatccatgttgctgtaaaggacatcatttcattcttttttatggctgcatagtattccatggtgtatatgtaccacattttctttatccagcccaccattgatgggcacctgtgttgatttcatgtcttttattgtaaatagtgctgcgatgtacatacacatgtatgtgtctttttggtagaatgatttattttcttttggatatgtacccagtaatgggattgcggatttgatggcagtgctgttttaagttctttgtgaaatctccaaattactttccacagtggctgaactaatttacgtttcccaccagcagtgtattcccaccaaatgttcccttttctccacggcctcaccagcatctgttgttttttgactttttaatggtagccattctgacttctgtgagatggtatctcatggtggttttgatttgcatttctctaatgattagtgatgatgagcattttttcatgtttgttggctccttgtatgtcttcttttgagaagtgactgttcatgtcctttgcccagtttttaatgaaggttatttggtttttgctagaacaagctgtttttaaggaacatttccaaagcttccacatgacctttcaactcatgtctccctggccacatctagctgcatgggaggctggaaagtatggtctttattccaggtagccaagaaccccaatgaaaataagggtctctcttgtcaggccagcagtggagcagggctactggggacagccagctgatagctgggtgactctgccacagctggttcttgcagcaccctgtgccacggctgagttgtccacgtgagctccagtctcccatgctgggggccgtgtgcgggaagtcaggatgtgtgccaggggcttcccagcagtctttctttccttcctgggatcagcatttgtggctctggatgctcccccatcacctgtcacatttttgtggtccttggagttcagtatcctgcatttttcaattcctcagaaagtgggtgccaaggtggaggccacatgggggctgcggcagagcttcatgggagctacttgggggctatagtgagggctcgggtggggactgcagtggggcccttggtgggggtgggttctcagtgtagaccttggccttgtttaggacacacctccaggccacagactccggtgccaggactcaggcagctgaggcatagacttagcctcacttggcatcagacagagctggacctggtcttccttctctgaagtttatgtggaagtaacttaccaggggaaacttcaagtgtgccaaatttgttctcccattgtaaaatgggctgtgctcatggaatgctatctgccatgtggaacagaggggtgaggccctcatggccacttcccagagatcatctgggattttgggatgtgggtagctattttcactgtggctgctcctatggctcctgaaygtgaaggtgtctgggcacctgtgctccttccgagaaagtcacacaggatggaggccgctcctgggtcagggatgtagcctgtgcaggagggactcccagggctgtgcccggcaggcttgcgtggctggggatggagaggaggcggaagcatctcagtgctgggtgcccgcgtgactactgctaaggctccttggagggagggaatgctgctggcactgagcacracaggccgctgcggaggggcttggagccagagggcgcggtgggagggatggagcttcttcccctcttcagcctgtttccgcgcttgtcagtgggatgttctacctgattctacgtgggatttaaactctgctcttttgcttttcttttcaaagcagagtgggaggggcatgggagggactgagggatgagtcggggaccctcacaccacatttctggaacatggtctctcagacgtaggggtgtgcccaacaggtcaagggccagctggggttggggtcagggaacatccaactggaggatgagaatcaaagtcctacttactccctcagtccagacaaggaaactgaggtctaggaaggggaaaggactctccaggatggcatagtttattttgaaaaatccaaacatttattcttttctcttgggggaaaaaagaaaatgcttgacctacacagctaagggagaagtaagaagacaaagaccaagaaagaatgccacatggtcccgtagcccgcctatctgtgtaagaacaagaggactctgtgggtacctcaggaggacagcttgtttttttaagccaatgtgaaagactctttctgggatattgttggagcagtagggggagggagagaagccaggttggggccctggtggagacagcagtgttttcacagctgtaaccctgctgtacactgaagcacaggccgagactcaggagtgtgtccagggagtagcatgaggagcgccgcagggaggcttgggtgttggggaggctgtgccagccctggctagtgctcctggagggagttgcttgttcagtggcagtccagccctggacgtgggcctacccaggctcaggggcccggcgcccttactggggagggtgaggtgaggaggagtggagggagggggccctgctgtctaacccgggcccttctcttctgtccaggagcggctcctcatgagcctcctgccccggaacgttgccatggagatgaaggaggacttcctgaagccccctgagaggattttccacaagatttacatccagaggcacgacaatgtgaggtagggctggtgctgacccggcacagcggggagcctgggaagctgaggtgtggagataatggtgaaggtggggaggtgatgacagaagtggggaagggatggatggaggtggggaaagaatgggggtgtggaggtaatggtgaaggtggggaagtgatgatggaagtgagaaggtgataggtggaggcgaggaggtgatagtcgaggtgatggtggaggtgaggagcggatagtggaggtggnnnnnnnnnnnnnnnnnnnnccccgtgctacagcctgcgcagtgccgtacgggcgcagactcagaggagacccccgtagatggaggtgtgtgggggatatggtggaggtggggaggtgatggtggaggtatggaggtgatagtggaggtgtggaggcgatattggagttgtggagatgatggtggaggtgggaaggtgatggtggaggtggggaggtgataatggaagtatggaggtgattttggaggtgaggaggtgatagtggaggtgtagaggtgatggtggaggtggggggtgatagtggaagtgtggaggtggtggtggaggtgtggaggtgatggcaaagttggagaagtgatgatggaagtgaggaggtgatagtggaggtgtgggggtgatgctggaggttgggaggtgatggtggatgtgatgttggagagtgagtaaactgatgatggaagtgaagagatgatggagaagatgtgatgatggtgcacatgtggagagtatagggagagtgtagacaaagtgtctcagtgtgtgaagggaggagagggcagatgtggtcaggaggttcaggtggacatctgcctagcagggaaacaggtcctacgtgtagggggctcttggcttcttgggtgatgcatgttacagttatctttccaatttcttatttcagtattcttacacttcctctgttgactggagagggtaaaaaatctgtccctaaacctggctttgagcagtgacattttgggctcagaatttgccatgtcagaatagtagctgagcattatgctagttgttgctgggtctggtatatgtgtgctcttctgtcttactctgttcatttcatgacagccctaggaggaagggattgttcccattttataggtgaggaaactaaaccttcaaagtgaaccaacttgctttagacactctgaggtttgcttgtttttttttttttttaaagattctgtttaaaagtatttattttattaaattgtggattccacttaaaaatacttttcatgcaagtatagtgtgcttagaatggtttgagtgttgcctatttgggattaatgctttacataaatatcactcaggtaggagatggtgtttgagggacctgaaacacttttccttttctgctgttttttgctggttcttctggatgttggtgtcaggcctcactgcccatttggcctctgaagacacaaaaggtcaatagaaactctcagtccttcttatgttgagcaccacagactgggtccctgcaaaccaacactcattcattggaaatgagttgaggtttgtgggtccatcagagtcagtcatccttgtgtgccaagccagtatggctaattgctgtctggttgagagctcagcagtcactgttctgagcacacgtgttcactgcccattgtcatgctattaagtaaggaccagtgttgtcctccttctgcagaggaggatgcttaagcagtgtggggtgaaggcccaagtgggtggaaagtagctgaagagccagcatttgagcccagcatgactgcagaatttatgctgagaacctctctgctagatacttggttctgtttaatatcatcatgcttctgtgaactgctggcattgtcacctccattttatagatgaggaaatttaggttcaacaaagtgaaaggtatgcaggactccctggccagtgagtggcaggctgggacaggaactgggattagctgacactaatatctgccttgacttttgtcatttcactcactgcctcttgttacaaaataaggacatgacacactgacccagtcccctgatgagaagaacagaccaccagaataatccctggaatacctcgaggggagccagagcctctccatactgcaggaaaggcatcaaaagtcaagagccttttgacagctagagctggcagacatcactgaccctttcccctgctcagcatagagtgaactgatgaagaatctcagctctaagcttctctctggggagagaaagagtcagtgtgaccactgccccaacttttatggggctgcctgaagaacaagcctctatctctcccctggatctcttgataggtcttgtacagtctggccaggagagaacagaggtggtagtctggggtgatagataccataacttccccctactcacccccttcccagcacagaatgaacagacaaaaataacagctgcctgcttttccctcaggagagaaagggttggtaaagcaccagaatctgtggctgattggtgagagtctcctcctgtacaggaccggtccatgaagattgggagaggtacctgctttgtctaaatctcagacaccaacacagagagttaaggaaagttaagaaccaggcaaagatgttccaaacaaaggaatgagataaatatacggaaactgactaatgaaacagagttatataatttacctgatagacaatttaaaataactcccataaagatgctcatggaggacaaaagaataatgcatgaacaaagtgagaatttcaacaaagaaatagaaaatattaacaagtgccagagagcatggagctgaagaccacaattactgaactgaaaaattcactagaaggattcaacagaagactagatcaagcagaataaaagatcagtgaactggaagacaagtcactgcagtcactggaaataattctgatagaggggcaaaaggaaaaaggaatggaaaagactgaagaaagcttgagaaaattgtgggaaatcattagtggaccaatatacaccttatgggagttacagaagaagagtgagcaacagaaccagattgtacacacaacacatacacattatatatatattttcatcatatattacatatatgatgtaaaaatatatcattaaatatgaatatgtatacacacaatgaaaatttcccaaatctggttaaagaaatggacatccagctacaagaaactgagatgacaccaaataagatgaataccccaaaattcacacctagatacatttaaccaaattctcaaaagccaaggacaaagggagaattttgaaaacagaaaggaaaaagtgatttgtcacatacaacagaaccagcgtaggataatggattttccagcagaaaccttgcaggccagaagggagtgggatgatatgtttaaagtgctgaaagraaataactgctgagcaagaatactatgcctagcaaaagtctccataaaaacatgaaggaataaagaccttcccagacaattaaaagctgaggaagttcatgactaaacctgccttacaagcaaggcaaaaaggagttcttacattgaaatgaaaggatgcaaaacaacaacacaatagcataagaaaatacgatacttattggtaaagttttatacatcaacaaatacaaaatactgtattactgtaattgtagtgcataaatcactttttattctagcataaaagttaagaaaacaaaagtattaaaaataaataactggaaagtatgttaaaatatatactatatgaataaatagaaactgtgacaacataaaataaattatgaagaagttaaagtgtagagtttctgtatgtaattgaacttaagttgttatcagctcaaaatggacagttatagtttttataatcactgaggtaaccacaaagaaaaaaaatggctatagaaactacacaaaggagaaagaaaaaggaatcaaagcacatcaaagcaaaaacattaacataacacaaaggaatgcagaaagagaggaaaacacaaataaagaactccgagactaatagaatacatttaacaaagttgcaatagtaagccattccctatcagtacttaaagtgtagatggattaaactccccagtcaaaacacatagcatggctgagtggataaaaacaaaaccaaaaccaagcctaactatatgctgtctatttaaggatgtacataaatggacagtgaaaggatggaaggagatagctcataccaatgagaccccaaatagagcaaagatggctgtgcttgtatcagaaaaaagggactttaagtcaaaaactgccagaagagacaagaagtctttattatgataaaagggtcagctcccaggaagataaaataattgtaaatatatatgtattcagcataaaagcacctaagtatataaaacaagcattgacagaactgtaaaaagaaatagaccacaaaacaataataataggcgacttcagtagtctatttttgataacagacagagcatccagacaagatcaaaaagaaagcagaggattttaataacactatagactaaatagacctaacagacatatagcggacattacaaaactcaaaaagcagaatacacattcttctcaagtgcacatggatctttctctaggaaaggtcatatgttaagtcacagaacaagtccttacaatttcaagaattatatcaggtatcttttctgatcacagagggatgaaattagaaattaatggcagaaagaaaactgaaaaattcataaatgtgttgaaattaaaaacacattcttgaacaattatggggtcaaagaagaaataaaaaaggaaattagaaaatacctccaggctgggcatggtggctgacacctgtaagcccagcactttgggaggccggggtgggaggtttgctttaggtcaggatttcaagactagcctagacaacatagtaagacctcatctctaaaagaaaatttttaagttagccaggcatggtggcatgcacctgtagtctcagctactcaggaggctgaagtgggaggattgcttgtgcccaggaggttgaggctgcagtgagctatgagcacaccactctactccagcagcctgggtgacagagaaagaccctatctcaacaaaacaaaacaaacaaacaaaaaaacctgaaaataccttcagacaaaggaaaatgaaaacacaacatacccaaacttatgggatggaacagaagcagtaataagagggaagttcatagcaataagtgcttacattaaaaaagaaagaagatctcaaattaacaatattaactttgcacctcaagaagccacaaaaaagaagaacatattaagcccaaagttattagaatgaaggaaataacagagatgagagcagaaataaatgaaatagaaaataaaaaacaatattaaaaaatctacaaaaccaagagttgctttgtgaaacattaaataagattttgacaagttcttagctagaccaataaaaaaagagaagactcaaataaaattgtaaatgaaagaagagatattataactgaggccacaaaaatgaaaaaggatcataagagactactgtgaacaccagcaaactgtgtaacccaggaaattttgataaatgtcaagaaacatacaaccaaccaagactaagtcattaagaagtagaaagtttgaacagacctatatatagtatggagattgaatcagttatcaaaacccaacaacgaaaagtccaggcccagatggtttcactggtaaattctaccaaacatttaaagaattaatggcagtccttctccaagtctccaaaattgaagaggagggaacactttgaaactatgaagccagcattgtcctgatactaaaggcaaacaagaacactacaaaaaaagaaattatgggcaaatatccctgataaatatagattcagatttcctcagcaagatactatcaaatgcatccaggatcacattaaatgcctcatacaccatgatcaattgagatttatccctggaatgcaaggatagttcaacatgcaaaaatcaattagtgtgataacaacatgttaagagaatacggaatacaaatcatgtgatcatctcaatagatgcagaaaaatatttgacaaaatttgacaccctttcgtgataaaaattctcaacaaattaggataaaaaatcccctcaacaaaataaaagctatgtatatgacaagcccacagctatgatcatactcaatgatgaaaaacaaaaagccttccctctaaaatcaggaacaagacaatgatatccaccctcaccacttctgttcaacatagtactggaagtcctgcccagagcaattagagaagaaagaacagcaacaaaaaaaggcatcctaaatggaaaggggaaaactaggaagcagaaggaaaacaggcaacccacaggaggggcaagtgagagtctttctgcagcccactttcccactggagatccaggtgatggtagggcaccttgatcctcccaagttttgaatccatcttagaaagcagctgggaggctgtaagcaggaactgctccagggagggaacttgccctgggtcccacaccgattctgcaacctatgtggctacagcaagatgccattttttaaatcctagcttttagcagagtgtgcattgttttgggatccagcagtgccagtcctaggcattcaggaaatgtgggctatttgcttgtggaactggagcaaagcaggggtgggctcctgcagctgtaactgagaagcaatcatggtgtggtctgtagccactggcactgggaagcaggcaccactcctggggcttaagcaggatgtgaattgctatggagtctcggtcttgagttgggtgcgggcttgtatggcctggggccgagttgcaggctaggcatggactgcctaggtctgaagggtcagctgtgataggtgggactgggatgagagagggatgtgtttaccccatctgctggccaaggctgtgactgctggggctgaccccactttccccttggcaggaccaaactcttagaatttgataaatgaattcaatcaagttggagaataggaaatcaatgtacgaaaatcagtagcattcccatacactaataatgtactagctgaaaaagaagtctagaaagcaatgccaattacaatagctacaaaaaataaatttaaccaaggatgtaaaagatttctacaataaaaactataaaacaatgatgaaagatattgacaaggacacataaaaatggaaagacatttcacattcatggattggaagaatgttactaaaatgactgtaatacccaaagtgatctacagattcagtgcaatctctatcaaagtatcagtgatgttcttcacaaaaatagaaaaaaaattccaaaattcatgtgttactacagaagaccctgaatagccaaagcaatcttgagcaaaaagaagaaagctggaggcattacattacctggcttcaagatatactaccaagctatattaactaaaacagcatggtactggtataaaaacagacatatagaccaatagaacagaatagagaacccagaagtaaatccatgyaattttagccaactgatttttgacaaaggtgccaagaacatacattggggaaaagacaatctcttcaataaatggtgctgggaaaactggatatgcatatgcagaaaatgaaactagatccctatctcttaccatacacaaaaataaactcaaaatggatcagacataaatgtaagacccagactatgaaatttctggaagaaaacatagtggaaatacttctggatattggtctgggcagatgttttatggctaagacctcaaaagcacaggcaataagacaaaaactagagaaatgggattatatcaaactgaaaartttctgcacaacaaaggaaacaatcaacagagtgaatagacaacagaaggataggataaaacatttgtaaactattcatttgacaagggattaatatccagaatatacaaggaactcaatagcaagaaaacaaataatctgattttaaaatggcaaagcatctgaataggcatttctcaaaagaagacatgcaaatggccaacaagtatatgataaaatggtcagcatcactaatcatcatgggaatgcaaatccaaaccacaatgagaatcatctcaccccagttagattggctattatcaaaaagacaaaaaagcaaatactgatgcggatgcagaaaaaagagatctcttgtaccagttggtgggaatgtaaattagtacagccattatggaaaatagagtggaagtttctcaaaaagctaaaaatagaactatcatatgatccagcaatcccagtactgggtatatatccaaagggaaataaaccagtatgtcaaagagatatgtgctctccctgtttattgcagcactattcacagtaacctagatgtggaatcatcctaagtgtccaacagcagatgaatggatagagagaatgtggtatatttacaggatggaatactattcaggcattaaaaaatgaaattctgtcatttgtgtcaacatgggtgttcccaggggatgttatattaagtgaaataagccagtcattgaaagataaatactgcatagtctcacttttatatggaagctaaaatagttgatctcttagacgtaggcagtggaatagtggttactagaggctgggaagagtaggaggaaggaagccacagggagagattggttaatgagtacaaaattacaggtagataggagaaataagttctattgttctatagcatgtagggtgactatagtaaacaataatttattgcaattttcaagtacgtagaagagacgatatttgaatgttaccaacacaaagaaataataaaaattggaggtgttggatatcctaatcaccctgatttgataactgcatgttgtatacatatattgaagtgtcacaccataacccataagtatgtacaattatgtgtcagttaatatatatatgtgcatatatacaaatatttatacaacatacacacacacatatacgtaacagaaaagaaggaaatcttgccattttcaacaatatgtatggagctggaggacattactgtaacctaagtaagagaaatatctgcatgatctcatttgtatgtggaagtaaaatagtcaaattcatagcagcaaagtagaatggtggttgctagggaaaggaggcagaggaaaatggggtgatgttggtaaaagaatacaaaattttagttaggcagcatgaataagttctggagatctaacatgcggcatggtcacaatatttaaccatactgtattgtatgtttgaaatttgctcacatacacgtagctatgcagaagtaatggctattttaattaccttgattgtgtcaattatttcaacctatgtaggtttatcaaaacatcaaattgtacaccacatatacacatgagtaaacacaatttttatgtcaatggtatctcaataaaggtgttaaaagaaaatgtgttatgcacataaaatgaaatgctgttaagccttaaaaaaggaaattcttcaatatgtgacaaaatagatgaaacttgaggacattatacaagtgaaataagtcagttacataaagactaaaatactgcaatattccacttgtatgaggtatttaaaatagtcgaaatcatagaattaaagagtgtcattgtggttatagggtcttgggggaggaagaaatggggaattaccagtcaatggccatgaagctgtagatatctgctgtacaatattttacctatagtcaacaataatgtatagtacactttaaaaagaattagtgaacttgatagctcgattatccagtgtgaagaacagaatgaaaaaaaggatgaagaaaatgaagagagtgtcagggacttaagggacaccatcaaacttatcagtacacacatattgagagtcccacaggagaggagaaagaaaaaggggcagaaagaatatctgaagaaataatggccataaatgtcccaaagwttttggaaaacgttaacctacacatccaagaagctgagtgcactccaaggtgggtaaactcaaaaagacccacactgagacatgtcattatcaaactgtcaaaaactaaagatatgagaacaattttgaaagcagcaagagaaaaacgagttatcatctacaagggatcttcaacaaggttatcagctgatttttcatcrgaaaccagggaggccagaaggcagtggaatggcatgttcaaaggttgaaataaaaatataattctgtatccggcaaaaatcacaagagcagcacctgctgttaccaccatgcagaatcttcttctcccagtgtctgtgtgcccctttccccctctgcccttcttcaggacccccgtgaccaatcctagttgacagtacacacagctccatatctgacttccctgcttttccatagttacatgtgtcacctttgatgttctctgcatgtttgccccttccctgaatagaatggagtctttctgagggcagtgaggtttgttcaaatcctttttttttgagacggggttccactgtgtctcccaggctggagtgcagtggcatgcttcrgctcactgcaacctccacctcccaggctcaagtgatcctcccacctcagcctcccaagtagctgggactacaggtgcacgccaacacacctggctaatttatgtattttttgtagagatagggtttttccatgttgctcaggctggtctcgaactcgtggactcaggtgatccacctgccttggcctcccaaagtgctgggattacaggcatgagccaccatgccctgccatgaatcttttattcactgctaaatcccaagcacctagagcaatgccagcacatatagccctcaataaatatttgttgaataagcaagtgaataaatgaattagaatacttaaaaattattataaatgattgtgaacaatcactgagctcttactaggggcaaggtatgacctggactctagtcttattcccattttacatggcggacatgcggaacggttggataagttgctgtcaatagtggagctggatagttcccttggagtccaattctgaaccctacttccctcctgtccctgcctgctggcccatctttggcgatacactgtgttgtgaacaaaataggtcattttcctttactttgcgtttatttcctatagtggtgctgggggcgttctgggttcaggaagcctcaaagttagagaaaaagccaagaacactttgaacaaatgtgaataaatgattgggaccctgtggagagatatcttaaagctacaacatttttacagacaaaaatatataattaatttttttctaatattttcaaagagcatgttttaatattgcaagaagagataggaaacatctttttaaagtcttattatctccagaaaacatgaaagttctgccctgtgggtagacactgtgtcgtttagggctgcccccagtgctgtgataaatagacactcagtacgtagaggctttgatgcaagacagtgtgtttcctgctctcattgcagactgagggggcggcccctttgcccaggaattcggggactccctcccttttcattgtgaagcattgacaccacactcagggcctgggagtttcttgcattcagctggcagaaggggaaaattaggatgtggaggggcccacatgctgaaaagcacatcacttctgctcggtgccgctggccacatcccagtcacgtaacctccccaagaaggggaggcaggtctagtggagggcagatgggctttccctatgtggygtgaggggtcagcatgggggatggcgagctctgaatggcctcagcatttactcccccagtggccaagcctcggcgttctgtggcttttctgagcctcagtcttctcacctgtatgatgggaaccaggaagccttcatttctggtctgcattgaggaataaatggggtgattgattctacagtgatttggagatgtaaacatctgtacatctctagggattatttcctgagtgactgggagaagggcagcctggcacccctttctcttgcagcatcctgtttgctgacatcgtgggtttcacgggcttggcatcccagtgcacagcccaggagctggtgaaactcctcaatgagctcttcggcaagttcgatgaattagccacggtaagtgcagcgtttttctttgttcgaattaaattagaattgcttctggagtgacgataagccaggtggattccctgtatttggaccatgaactagactgattgctaagcatttcttccagcaaggttataaatcacctgttgtttttagcctcactgttcattgattcctttccttgaaccggagccttgcatttaccagataagaaaatgcttgcacaagcatggccagcatgctgtcgaatcggggcttccatgcagaaggctttgttgtgcaggccatacgtaggtacgggtctgtcctgtgcaccatcctgctgccattgtgtcccactgtagacagagctggtgttgcaatccctcgttctgggctctactggagcaggcctgattctgggtctgccaccctcctgggattgaaacttgtcagctgggggcccagttgctgacgtctcctgatgcctggtgcaggcagtggccacccttgccctcagcagactgcgtgctggggttttgaaagaccttccttggaccagtcacatctggcagccaagttctgctgaatgtcgggccaaggccataccaacagcgttggcttgtaacgtgcatgttaggaagcaaagatgagcaagctagccaaacctccttgtacagaggtttgccctcctgggacttagtcacattggccacaaggctcctgaggggctgccactgtccccctttctcccccacagaatgtgctgtgtttagagataggacatgtcgggctgggatctgagctgcagaagccaacagacgttgcaggcccagagagagcacatctattgcatggcatcgatatcctacccctcgttttcctccgctgcccatggatacattgtactactcatcagccatcagattgaaagctagaatgtgccctatttgcaagtgatggaacttcccctcttgccattcacctggcacatcctccctgagattttcacgcccagactgtgcaggaagggtcggcttctgcagacaactgaccatgggcacaggaagtctcctctttcgaagagggaaggggaggagggagtccggtgtcaggagagcccaggatgtgatgcttttcagggccactgacccacccgagtttccttggaccccagacacctagcatccctgccctgtgagggtgtgggaggagtacagtgagatggagccaagttcaagttcacctcttgtctagcctcactccaggtggtcagggaggggcgctgagatcagtgtgagaggaaggggcagtgagctctgttcagcaaggcagcatcttttcagagaaggtgacagtgaagagtcttgagggaaaatgtggatgctcccttaatgaaggaggggagaagagggcaccctgattgggggctggcttgtgcagagtcctgaggggcattctgagcacagggcagggctgggcaggacagagccaggcggtagtcacacgagctgaggccggtgagacttgccatgcctggcagcagttagggggactcactggaggtgggagaaaacttgggagcctgttgcagacacctggttagggagagaggttaaggtaggaggggcagggggaaggagggtgggcatgggggattttggacgctactccctttggaagatgcctgtggggaagaaaaggtcttgagatccgagttgtaaagtcactgtttacttttctaataaacagtggaaaagatcagcaccttttacttttccagtaaatagtggaaaagtaaactgactttacaactggatctcaagaccttttattccccacaggaatttttgtgggcagtcacaccccattgatagcctgggccaaagttccacagcagcctgtttgggaaagcccacttcatctttctgctgggcactggagcttctggtctgcaatgcccttgcagtcttgtctgggctgtccactaggcttgtcccctggactgtgcagccagtattgtgtcctgggcctgctccttgcttcccaccccttcagcaggaagctggtcatcttgggaacttttttctggagggtcccgcttggccccacctgggccttttctctctcaccgtgcttggagctgatgctgggccctccactcctagcatctgattgtcttcctggcagtcctgagatgagcacctttgtctgtgaggggacaggacccacgttgggtcagcccaggccctttgcagtcctgctgtagactccctgyggctctagttctcttatgaggcaccttatttcagcccagttgctttgcagtttcttcctttgataaagaagtgctggctcctaggagaggctgaaggtgtcacggagagctgcctgctgctcatggtgctgggctgtcaccctggtcccaggccttggcttctgctgttcctttctatctgtgccactgtccagggtgtatgggcgggggctctgggcctgtttcgaggcatcgtcacatgctctgtcatctcatgtttccatgttccaagtggctccttgaaacctacttggctcttttgccaggacactgattcatgcctgggatgctggcttacatacttttatcaagaagaatgcacacacgcatcagagagtgggtgacgtacgtggtggagatgcctgatgggtcaagtggagtgagagatgtattgagatgtgtgtgcctgtacatatgtgtgtgagtgtgcacatatgtgagcatgcatgtgcacacgtgtgtacacatgaatrtgtgaacatgggtgtgcatgtgtgggaatgtacatgagtgagcctgtgtgcctgcaaatgcatatgtgtgttatgtgtgtagatgtgttacatgtgtgagtgcttacatgaacacacgtgtgtacatgtgtgtaggtgagcatgcatgtggtatatatatgagtatgtgcatgtgtgtgtacctgtgtgagtgtgcatctgtacatgcatgtatgtgcctgtgtgtcccctgtgggtcaccacctttggttgggaacattctcttggagacctttggcagcacagaacacagtcacctcatgagaaatggggactgagctgacatggttttgtgtcaggggagtctgtcctcttgacttcccatgtgtgcacggatgtgtgcattgcagacacctgctgaagcacaaagccctgcactctgctatttgcttctcccagtgaccatgcaggattgtggtgttaacccatgtccaagagaaggagattgagggtcagggagaaccagctacttcctagaggcttggtggctctggacctaccagcccctaatgcgaggctctctgcctggggttagctgacgaggtctgtgaagggcagatagtaaatatttcaggctctgtgggttacgtatcgtttctgttgcagcaactcaactctgctcttggagcacagaagcagccacaaatacgtaaacaaatgggtgtggctgtacaccagtaaaactttacaaaacaaggagtggtccacggcctcagcgtgccagcctctgctctaaaccgtgacacccaaacagtgttacgtttaaagacatccatacgccctgtgtttgccatgtgcctgcccagcagctgagcagtggctgatgtgttggcctctgggcggtggagtgtcctgggagtcagccccgtggagcctccaggttgtgctgctggccgcctttgttcttggggacgctgtttctgggtagcagggctgacagtgctggcagaggttaggatatcattacagctgcaagatgccttcatgcagcccttgaattctgccagctgagagctccacgtgcccacgaggagcacagcagagagaaatgaagcagcagtccctgcagcagcagaaatagcatcacccccgataactacaactctggygtaaattggctgctcagtccccagcaacatttgagtttgagctgaagagaatattttctagtttctaggaacacattattgtaaatgggatccatttgggcatgaagcccttgaccacatgggagcagaggggagctcgattagggatctcaccagccaggcaggaaggaggacggggccttgccctagtgcactaatgccaccacagagtgacagccttggggtgcagagggctgggcagtgtgtgggtgggggcacatattgaccagcaattgttttatagcactagagggccagaaggagatgctccaatgtgagcagatgcaggcacaaggggctggacctgtttcttctcttgacycctgccctcaaaatcagggtagaactttaagagccttagttgaaagtcttgagtttggctgcactatgcaacatgaggagacaaaggccaagttgttgacctcacagaagtctttgtaacatcctggccagcacatgatgtcatcttcattctaagagtgagcagaatgaggctcatgtggtaaaacaacatccccagagccacagccaggattggaagcggtgtcattatggctccgaagcctgtctccctagaagagwactcctactcatccttgaaagccccaaaggccatcttttctctaggtctctgcccactgggcctctgacctttcaccagccttctgtggaacgggtgcatcctgtccagctaaccctactcattcatcactgtgtgtgtggctgttttccagggaggggttggcctgtggacagcccatacacatgtctgagttggcactgagtcccagcgctgaccatggagcctggcacacaatggctatccccgcctgtttaagtgggacagtgccatgccagtgtgtcctctccgatggattctagactccttggcctgttacctgaagctgggggacctctgatggcgcccacatatgagaatggccagaggaggggctggggtggcctacaacaggcactttttggccagcaggagcctcatttggggaagctgagttgggctgggagcagggtcagtacctgggacagctggctttgggtttccttagggctcaactatctgtgcatgatggctctgaagagcaggggccacttcttaccctccccatagctgtaaacaggctccagaatccactcgtggggagatgcatctgcagagcaagcmcaagtctgactggctgtcaccaggtggtagtgagtgtcctgtggggttggagggaggataccaagctccccaagacccccggcgcccacttcgcatatgcacagccatggctgagcatgaggctgcccctggcaggctcctggtggggaggttctttgctatttctcagcacatgattgagaagcaattgtcatgtcacctgggacaccttaaggtggattcttaggccagatccagaaccactcatcagagtcttagggataaggaatctgcattttgctaactgccctggattttgcaggccagaggctgagagccactctctaaagcttgtgctcgtatacaggccactaggcctcagaggtgggtctcttggcattctccactctgaccccatgggttttcctcacaccccaaccttccagccaagtgagcctctcgctttccctgcctgaagacctcggtttccgccatccatctccatgctcctgcccatgctctagcccctccagacccctgcacagtttgtaatggacagaatggaaacacatctttcttcacacagcagggaaagtgtttccctgtcctgggatccttgcagagtgacctgcccagactctatcaggggtggagggtgagcggtttctggaggaaggggaacatggggagtatatgaggaggcacccctgcccttccccaaggcaggacatcccatgggctgtgttttggtgtctttaggaaaattattaagaagagttctcgaatatgtgtggatgactttttgaatacaaagggaatctgtcaattttcctaggaaaggtttacataatactctgtcttctgcaacctggcatgcttctttcttccaacaaactgcaccacgtgtggcctaactagtgcctgccttccgataatgcgtgtgagttctgtggttcagtacctctgggatatgttacacctcaccgggatttctgcagcagctcctcatggggtgagcatgaggagctcttcttcctgtttcaaacctttcctcagcttcccactgtcctaggtggcacagagggctccttactttgaaggtatgattgactgataatgagctgcatatgtgtacggttctgttcatttgggcatatgtacacgtgtgaagccatcaccacagtcaagatgctgagcatatcttccagtgtttcctagacccttcgcaatccctgtctcctcccacttctcattttactctctccctgtgtccaggcaactactaatttgctttctatcactacaaataagttggaattktctagaaccttatatatatggaacaaagcaatatgtactctacattgtctggctttttttcactgagtgtaattgttttgagattcaaccaacttgttgcatgtgtcagtacttcattccttttcattgcttagaatcatcccattttgtagctgtactgaagcttgtctgtttattcactttttgatggacatttggttatttctaggtgttggttattacaaataaagctgctatgaacattcatgtacaagtctatgtatgggtattcagttctcttgggtaaatacctagaagtagaatggctaaaaaacatggyagatgtatgcttaactttttttttttttttttttgagacggagtctcgctctgtcgcccaggccggactgcggactgcagtggcgcaatctcggctcactgcaagctccgcttcccgggttcacgccattctcctgccttagcctccctagtagctgggactacaggcgcccgccactgcgcccggctaatttttttgtatttttagtagagacggggtttcaccttgttagccaggatggtcttgatctcctgacctcatgatccacccgcctcggcctcccaaagtgctgggattacaggygtgagccaccgcgcccggccgtatgcttaactttttatgaaacagacacaatgttttcagagttattgtagcatttcacattcccatcagcagtgtgtgagttccagttgctccrcatcctcatcagcacttgatgtggtcagtctttttaattttagtttttttctaataggcatgtggtgctattttattgtggttttaatttcctattttttaatagctaatgtggttgagcatcttttcattgcttattggccactcatttatctttttggtgaagtgtctgttgaaaccttttgaccacttctttttatttgggttgacttttttctttttgtgaagttttgagcattctttgtatgttctacatataagtcctccatcaaatatatgatccctgagactttggcttgtttgtttattctcttaacagtgttgtttgaagagcagaaagttttagtgtttatgaagtccagtttatcagtttttttaatgcattgtaacttttgtgttgtatttaaaaagtctttgcccaaagtgctataactgtgtgttggtttcccaaggctactgtggtgaattaccacaaacttggtggcttgaaacaacagaaacttctttgagagcagttttggaggcccggattctgaaatcagtattgcttggccaaaatccagatatttgcagaacgatactccatccagaaggttccaagggagaatttgtcccttaactcttacatcttctgttggctgttggaattccttggcttgtgggccagtctccctctgtcttcatattgctgygtgttcctcttcattcttctgttttctctcactctctgccttttccccctccctccctctctctttccctttttctgtatgtgtgtaaaatttcctcctgcctcatttttataaggatacaggtcattgtattcagggcttatctggataatccaagatggtttccctattttaagatccttaatttattacattagaaagatctttgtttttgtttgctttgttttgtgctttgccatgtaagtttgcatttacagattccagaaatttgactgtgggtatctctgggggtctcgggaggcatggaatttcagcctaccacacactgagagcagccatccaaaatctctctggatttcagtctccttattcaaaaataagactaaatatgactattttggttggttagtgagaagtaaaataatggaaagtaaaataataaaaggtctaaagcatctagcacagtgcctaggacaaggtttacactcaatatatggtaattatcattgttaccaggaaagctgtgatcagtggggtcagtgttgttaaaactatgcaggtatttgaaaatccaacttgaaaatcattgagaccctctaacataaagatatgataaactcattttaaaaatcccatcaagttcttagataaccagataacatttgatgctagaaattgtccatttatcagctttgtctgttttagagaattgtcaaataacgttgtccttattagcattataatgcaaccggattccattttaactctgcaaatgtcctctcattctgctatgtgcaggaaactgctaatcactggtacgggcatatgtaaggagaatacaatctgtgacttagtctgcctcacaatccagcaggggaacaaaagttttccttaaatacttgttttacagagcacatactatatcacaagtaaattgagtactatttcacttattctcaattttataagctctgcatccaaacttgaaaacaaacatcatccacaaaaagtcaaagcattagatgcaattatcagattaatgtttaataaggtgaaaacacaacatagtgtattcataatttttgtgcgcatgtgaattctgtagctttacaaatacacattgtcctaaggaaaactcacatgagaaagatacacaaataatcacaatcatttgtttcatttgccagctatctaagccaagcctgcatatctctgcatctcagagtaaggttgcaaagtaaataaatatatacctacaaaaaataaagtaaaaatctttgcctaaccaaagtcagattttctcctgtgttttcttctaggggttttatagtttgaggttttacatttaagtttataatacatttggagttaatttttgtgtatgtttcgaggtatgggtcaaagctggatttttttttgttgttatcttgatatctaattgtcccagaatcatttactgaaaagactatcatttctctactgaattccctttccaaaatgttagaaaaatcacttgtccatatgtagttgaatgtatttctggattttaaaaaattctgttccattaacctatgtgtttatcttgacatcaaaaaccacacaccctggccctgtagttttataatgtatartctggaatcaggtcctgtgctttatccaagtttattgttctttttcaaagtgatttttggctattctaggtgctttgcttttccatgtgaattttagaatcaatttgtcagtttctgtaacaaaggctggtggaattttgtttgggatttgtgttgaatctatgttaccaatcttcggaggattaacatttaaaaaatagtcttctgattcacgaacactgtatgtttatttagatttatttagatattctttaattttttctcagaaaaaatgtatagaaaaaattctatacatttctcagaaatgtatagttttcagtgtatatgtatttcttttttcttttttgacacagagtctctttctgttactcaggctggagtgtagtggtgtgatcacaggtcattgcagcctccacctcctgggctcaagcaatccttctgcttcagcctcctgagtagctgggacgacaggcacatgccaccatgcccagctaatttttaaattttttttttttgtagagacagggtctcaccatgttgcccaggctggtctcaaactcctgagctcaagagatactctcgccttggcctcgcaaagttgcagggattacaggcatgaaccaccatgctcggccaatgtatatgtgttttatatattttatcagatttattcctaagtagctcctagctgtttcttttttagacggagtcttgctctgttgcttagactggagtgcagtggtgtgatcttggctcactgcaatctctgcctcccaggttcaagtgattctcctacctcagcctctggagtaactgagattacaggcacacaccaccatgcctggctaatttttgtatttttggtagagacgaggtttcaccatgttgtccaggctggtcttgaactcctggcctcaagtgatccacctgcctcggtcttccaaagtcctggtattacaggcgtaagtcacagcacccggccaatgctattgatttttaacttttaatttctgattgttcattactggtatagcaaaatacagttgacccttgaacatcacggatttgaactgtgtggatccacttatacatggatttttttcaataaatatattggaaaataytttggagatttgtgatagtttggaaaaactcacagatgaactgcgtagcctagaaatattgaaaacattaagaaaagtttgagtatgccatgaatacataaacgattatacatgtatttaggttggtgcaaaagtaattgtggtttttgcctttaatagcaaggcccggcacggtggctcatgcctgtaatcccagcactttgggaggccaaggcgggcggatcacgagatcaagagatcgagaccattctggccaacgtggtgaaaccccgtctctactaaaagtacaaaaattagctgggtgtggtggcgggcgcccgtagtcccagctacttgggagactgaggcaggagaatcgcttgaacccgggaggcagaggttgcagtgagccgagatcgtgccactgcactccagcctggtgacagagtgagacatcatcgcaaaaaaaaaaaaaaaaaaaagtaatagcaaaaaccgtaattacttaaattacttatagcaaaaaccacaattacttttgcatcaacctaaatagatactagcctatttatatgttaatcaactgttaatgttattggtaaggtttctgcccaatggtaggctattggtagctatgtttttgggggtagtcaaaagttatacatggattttcaactgtgtggggggttgtcactcctaacctgtgttttgttcaagggccaactgtacaattgagtttttgtattgataaactgtactgaaactccgctgagctcactcatttctggtaggtttccgtatacatacgttttctacataaatcatcatgttgtttgcaaatgaagacagattttcttctgcctttcccgcttgggtgccttttatttgtgttttcttgccttcttttactggctagaaccaccagtacaatgttgaatagaagtgtcaagagcaggcattcttgtcttgttcccaacagtaggggaaggcattctgtcttgcatcattaaatatattaccagttggattttttgtggatactttttatcaagttgagcaagtttccttttatttctagtttgctgagtttttttttttttttgattcagraatggatgttgaattttgtctaattcttttgcatctattggaaggatcatatggtttttctttttagtctgctcatataatgaattaccttgattgatggtaggatatttaaacatccttttgttccttggacaagccctacttggacataaagatggtccccgacttatgatagtttgacatatgctgttttgactttaagatgatgggaaaatgatacacattcaatacaaagtgcctccctctcgtgatgctgggaggcagcagcaaaccacagctcctgatcagtcatacagttttgactttcaatattttcaacttaccatacatttatgggttgtaaccccatcagaagttgaggaggatttgtattgcattatccttatttattgttggctttgcttttctaaaattttgtttagaaaatttttcatttatgttacttaaagatattagtctgtggctttcttattctgtacatggtgtcaagataatgcttaactcatagacgagtttgggaacatttccttttgttgaattttttggaatagtttttgtagaaatggtattctttctttcttaaatgtgtagtagaatttaccagtgaatccatctggacctgatattttctttgtggaaaagtttttaactacaaatttaatttctttaaatagagctagtgaggtcagtttttttttttttccttaaataagcttggtggtagttcttcatagtatttccttgttttccttctaatatctgtagaatctatagtgatgtcacctcttttatccatggttttggtaagttttgtcttctctttgatcattttggctacaagtttatcaatttcattgagtttttaaaaaataactgcttttcatttgattgatttctctattttttctatttagtttcttttcgtatctgtattattgtttttcttctggttattttgggtttaatttgttcttctttttgtagtttcttaaggtggatgccaaagccattaattaaacattttttatgtcttttaatataagaatttattgttgtaaacttacctgaaagtattactttagcagtatcccacagtttctggtatgttgtgtgtttttctaattctgttcaaaatactttctaatttctcttggtttttttttttttttttttttttttttccagacccatgggttatttagagatgtgattcagggatatttcaaagatcttgttttttacttctaatttagttcttttggggtcaaaaaacatactttttattatttgaagcctcttaaatttatggcccaaaatatggcttactttgggggtttagtgctctgattttgaaaaattctgttgttaagagtgtgttcagtaagtaccaattaggtcaattggttgataaaattgttcatgtcttccatatctttattgatttcctggctacttgttctctcaattattgagagaggggtattaaaatctccaacataattgtacattttttctttcagttctatttttacttcatgtattcttaaactgttattcaatttttaaatatttgtaatggttatgtsttcttgataaattgactattttattattaagaaatgaccttctttattctggtaatattttttgctttgtaatcccatttgtctgatattaatagagccatttcaactttcctttgactattgtcagaaagaatagttgtcactcaatacttacagggcattgttctaagactaccaatggataccaaaatctggatactcaggtcccttataaaaaatggcatagtatttgcatataacctttatacacatcctcctctatattttaagtcttctctggattacttataatatctactacagtgtaaatgctatgtaaatagttgttatgctgtattgtttggggaataatgacaataaaaaaagctgtacatgttcagtatagatgcaaccttgataggcctaactacattctgtcatctgcagttggttggatccatggatgcagaacccatggatgtggagggtctgtgtcttattccatccttttatttttagtctgtttgtgtgtgttcgtttgtttgtttttgttgggacagagtctcgctcaggctggagtgcagtggcgcaatcttggctcactgtaacctccgcctcccgggttcaagagattctcctgcctcaacctctctagtagctgggattacaggtgcacaccaccacacccagctaatttttatatttttagtagagaagggtgttcaccatrttggccaggctggtctcgaacttctgacctcagggaatccgcctgcctcagcctcccaaagtgctgggattacaggcatgagcctccatacccagcctgtttgtgtctctttatttgaagtttgttcttagttttgcttttattttttctacctaagatgacaatctctgctttcaattggagtgtttggactgtttgcattagtgatgtggttaggtttggtctgttaccttgccattcgctttttgtctcatttgttctttgttcccttttttgttttctttggccattttgctaatttattatgttttatgatttcatctcactgcctttattggcttactagtataattctttgttttgttatttttgtggttgctttaaagtttataataggtattttaacttttagcagtctaccatcacatgatttattaattacagcataagaaacttacaattatatacatctgtttcttccttcttggcctttatgacattgttcccatacattttactttttctagtgttataaactccattttacattttatttacacagtcaattctctttcaaagcaatttaaacagtaaaaatatctgatctgtttattcatgtagtaactatttcctttgcttttcattcatttatgcagtctatttctttgtgttttatgtatctgcctaaatttcttttggctgggtgtggtggctcatacctgtaatcctagcactttggaaactgaggtgggaggatcacttgaggccaggagtttgagaccagactggacaacataatgagaccccatttctactgaaaaaaagaaaaaacttaactgggtgtggtggcacatacctgtagtcctacttatttgggaggctgaggcaggaggatcgcttgagcccaggagtttgagactgcagcgaactatgatcacatcactggactccagcctaggtgatagattgagaccctatgtgtgaaaagataaataaaagaattttaaaaaacatttcttgtagtgctggtatgctggtgatgaactctttcagttttcgtacttcagaaagactctattttgcctaaattttttaaaatgtattttcaccacatggagaattctaggttgacagttttgctttgttttcttcagaactttaaagatgttgttctattgtcttctctcatgctgtctccaataagaagtctaccatcaactgtctttctttgtttgaaataggtcttctctgtctacttttttttcttttcatcactggttttaagaaatttgattttgatgtgaatttgagttttcttcatgtttcctatgcctgcagtatgttgagcttcttgcatctgtagttttacagttaaatcaaatttgtaaaaacaaaaaacaaaaaaaaacctgggtgatcctttttcaaatacattttatgactcctcctcttcctccttcggggacatcagttccacatgtattagggagttccactcttgagggagcctgtagctcattggtgattttcttcaaaatttttggattcttttcctttctatttcatttggatagtagctattttcttctgcagtgtatgtcatgtcattaattttatccagtatagcttccatctcagacactctagttttcatcttcagaagttcaatttgaatcttttttccctttgttgaggtaactgcctgaaagttcaaaattggaatgacccagtttgctccttttttttttttttttgtattacttgtttggtttttctttgtgcattgttggtgttacgtatttttcaagtgtatgttttactctaatctgcctgagtcagtttttgaggagcacataggaggatgtgtgtgcctcatatgtgctggtcttgtgtgtgagtccctgttgttggacatgcaggtggcccctgtgaagtaggagcatgtgagatgcgtgtccctcagatgtgctcacgttgtgtctgggagtatggcagcaatggagcatgtcttttaaatgctttggtctccataggggcattatatgcaggaaagagctacctttccttctaatggtttatagtgagtcgtggctgccagatgtccatgcatactgaagcccactggtagccaggatgggtcatatttagactgtaggctcaaggttgtataattgatggctgcaagggcctgtttctgagtctctggtgttggagatgcaggtgacccccatgaagtaggaccacatgggatgtgtgtcccacatataaacttgtcataagtctgaggcccttgtgttggtgatgcaagtggcccctgtgacgtgcaggcttggaaaattacacacagytacagtccaaacatatctttctctatgaaggtctctgggggaagttaaacaaacacagaacatgtttgccttagtctcgatagtagctgatggtttatttacctccttagccatggttgatagtcacagatgtgaacaatatttttgaccttttccccatttattggatacttgttagatttacatttgctttaatacccatgtatatttgggagactggccacacccctttgaattgatgagaaacacctgccaaggcccagtctcattccaccttcacctgtggagggacagggccccttctctggatgtcagttttcttaacaggaacatgaactggttgaactaagcatacagttccttcatccatttccagaagactgtggggcagcatggaggggttcactgtgtgccatctgcagaggtaagacaatcctagcttggcaggttatcagctgggctgcctggggctcatcctgatcccattcctcaagtggatgggagcacagccccttagttctggtcataactccaagacccttctgggaacatttttttcccaatgagagcacctcacattgttgtaagttctcagtcccacagtgactgtttcctggcgcatgccagagatgcattcagatttcagatggtacaggcgggtccctgatggggatcagtgcaagagtagactggtcagtgtggtgaggttagacaacccccatgagacattcccattccttggactgggcttgaggctacctggatctaagtaatcctgtgggatatgctgagccaactgatggcctctgaaagtctgtgctgaccccaaacatggacacatcagtagacattctgatccatggggacccaacacagaggagtagttgagcaatgatttaatgagtgtttaagttaggatcgcttgcattcatataatttgctttaagggaatataagacaagtgttgtgccgggtttaagaatcctcctacaggctgacacagtactgggcctcctggtcatagatgacaaggcgaacattcatggctttatggtgcagttgttactcaactgaacctagctttgattgcccagcacagtaaagccaaaatatctacatggagggagaaatatctacagcaggagaaagaagggccttcatttgcagggtgccaagcaaggagaattgagcagctcccgcttaagacagaacctctccaatggcttgcaagcaaggtttttaaaggcaggggtaaatttcaggaaagcagaagttacagacaaaatcataaattgatacatggtagttatacactggtttggcctaaaaagatgggatatcttgaatagggatatcttgaataggactcctaggtagagtcaaagtcaaagattttctgatttttaattggttaaagaagagaagttttgtttaaaatgtcgaggcaacagaaaagaatgtcagctctggcttgtgggtgtgacttccttcaggcccttaaggaagaaatttaggacaaagattggcagtcagagttcagtcctcagttctccattatttgaggtctccagcatatccatttggggtctaggtttctaaaaaacaactcagggacatatgttaagatgttatctttattttctataggggaccaaacatcctttaacttttaactattgttaaagtaactttaacttccttggctattgttttaagctactgttatattcttgcttatcaggttgctcatttacctctcagggctagctgggagcctggaatttcccttgaaggaactcaggattttcctttatttccatgcttgtggggtcctgcatacccctaagaggggtccctgctctatctcacagtctgaccattttgttcaacctttaattgccaaaagatgacattattatggcttgtgttagtgaggtcattatttttcatttattttgtgtttactctggatatttccaaaagggactcatggaagccagcccaggagacagagctgtccctgtcaagtctcaggttcatggagctgtgtattcacttccatacttcctcagcccctcccagcctttgctctccttgtggatcctttcactgggcttgattccgaggccaggaatcaccaggcagctgcaaggactgcacccacgtcatcctcatgtcttggtttctatgactataaaatgtgaaaaggacactggaaagtctgtacatcctttgctgctcccataccccagttctgtgagctgctaaaaaactggccacactggaggcctgaagtgaattctcacccgtaatgtagctccaacaattgttaatgtctggttagtcttgtttggtctctaccctctgccttccctcaaatcctagacatcatctcgctgcctccataaatcctttaactctatcatctgagaacttttgacctggcaccaccacgataccattatcatacccaaccaaactgatgaaagttacatcatctctaaaacccagtctgggctyggttcacccttgtgtctcaaaaatgtcttttcggccgggcgcggtggctcacgcctgtaatcccagcactttgggaggccgaggcaggtggatcatgaggtcaggagatcgagaccatcctggcyaacaaggtgaaaccccgtctctactaaaaatacaaaaaattagccgggcgcggtggcgggcgcctgtagtcccagctactcgggaggctgaggcaggagaatggcgtgaacccgggaagcggagcttgcagtgagccgagattgcgccactgcagtccgcagtccggcctgggcgacagagcgagactccgtctcaaaaaaaaaaaaaaaaaaaaaaaaaaaaaaaaaaaatgtcttttcatcctggctgatttgttccaaccaggatacaaatgagatggacatatgtcttgattgtcttgcgagattttaatatttggaggtgactgaacaatgacacagacagtcccgtgccattgagggaagtttattactcacagcctgtagaccagagggcatgcatgccatgccaaacagggccacacagtgagcacccaggtcatcagcaggcagaaggaggaaggagacagtgtggccttgagccttcattgtggtttcagggtaaggaaggggtggggcaggttaagcagcttatcaggtttaggattagatagtttgaataatgtgcatgggctcagggctataggagtgggccctggtttgtacctggccagggggtgatttagggcaggtaggtgagaattagattagacaaagggtggtcaggggatggactggggatgggttggtttgcatgtgaaagtatttactgtttctaggaattagctagtcttgggatttcccttttagtctttaacagtgcccctcccattttggccccccatcctctgtgacatttttttatgtgctcctcctgcccacttgttggcttctatgaactggtagatcttcaggagacttagtagtttcttggatctgcttttgttgttgttgttgttgttttaataacccttccctgggtggctgtgcacttctcgttgcttctctctagcaggcaggtgctggctccttttcttcttgccaggttgaggttgatggtggagcggttatcagtgagacccgtccatcaatggtctcccatccacattgcacccaatggttttatagcagctgccttgcaagcatggctgacattttgtgttgcatttgactttgcaaggtggaggtttttaattccctaatttcttcagcattattagctcatgattttttctaaaaaagaatacttattcagctatttggttattctcaaaaatagtaaatgttcaattctttttacttatcagttttcaaaataataatcagcaccccgttatgaagtcatggatttttaaaaatttgatgtgttttgatcgattgccgtcttttttatttttggtgttaaatttcctattttggcaagtgggagcctgttcaggttactttctgttttctgtcttttttttttttttttttaaggtcagtcacctctgagcagcatcttcagactaatcatttttctagaaggcctggtttctttcagtgggaaatggtttttcaacaccataatctgggttgtaattggtccgaggctttttagggcattgagataggatttttttttaggaaaataaaaataaattatgagtttatattgatatttccaattcacttcactccttggatttttatatttgtatctttttggtgatgctgaaaattctaatgacagtaatattatttatttcatctttccatatatagtaggctcaaaataacattgccaatattattttcaacaataagtctgctgaatgcaattggagatttctttgtggttatttttgtccttgcattatattctaccagacatacagtcaaatatgcattttctcatcgctcgaaataattcttctctctgtggtcatgctggtaacaggtttatttcattttggttttgatcttttaggtataactgtttttaatttttctttttaggcacataaaataattgcatggttcagttccacagtaaaaaaccgaagtcgaggtacatggagagacccctcccttgctcactgttcctcccgtgcgtgtagttagatgtttgtgctgggtttccccttgcccctccatggttccttttggtttctttttgatgctggtagtgcatgcactgtgaaactgttcctggagagtgcttcccaacagggcacgctgattcctcagtcctcccctgaggcagggaggcttccggggacctgatttgatcctgttgatgaacaggtgtctgcagagttcttgtgtttcagctcttctgcgctatctctgtagcaggaagcttcctctagggttttctaaaatttcttatttcgttcttccactgatagccaaacactccagtcttacaaagttaattggacttggccagtttgggttttggatgcagtcactttcgggcaaaaactggattgattcaggcttttcatcctctccttctcccaggtatctgttttcttagaattgggatgcagtgtgcgagtccatgrcctctctggactctactgttttagagctggccctagagcggcctgggcatgtcagagctctggaattggcagtggatcttcctgagccactgactctctgctttcttctagacgttacctctgtgcccttctgggacgggtcctggggctgggcagggtcagagtgcactggcctatgtgagccctttttgttctagacccttctctgtggctgcctgctcagtcaaggccatgatgggcccagactgtctgcaagctggccgcagctctttaggccatacctggagcaaatcaggagactttcctatctggattctcctgcagtggctctgttatactgagaagcttctgttgtcatgtcacctgcctgtagtcctgtccctttcaagcctgggagggagggggcagctcttgtcccttagggctgaacatgcctctgagcccctgccaaccctccatctcatcttcttctttcttcttttggaggagacacaacacttcctgtggtgctttattgcagtggactctaggtgctgactttccatatttatacaaaagagtctaaaatcagaaacactaaaaccaattagaaataccttttttgatctcttaagcttgctaacaaaagccagggcctctgagattaaagacaaaataaagcaatatattcaacatttgtcctaagctgtctccactagtgccagcgtggtggaggtgggtgggaaagggatgccatgagrgcccaggagggttctcagctttgcatctcagaacagtttccagagactcatgtgtgatgctgagtgagctggatatgtgcacacatgtgtgtatggtatgagttgcccaggttctaggagaggattgctgttctaaagacaagtgttctggacaatttctttagaatacacaagccctcatctgcttgtaaggccttgccacatgaccatgtgcatgtggatagcctgtgctagatggctttgcccttggtcctcatgcagagataggttctccccactcacagctcgcccacaccatgcagtgacggtcacacttgaggctccgtgggcatctctttagccttcattcccgtgtgctatttatgcctccttttacataggactcctgtagggatggtaattgaagattccaccccagccagccccacagcaatgtccttttctgcggtggccatgccaagtcttggtgtcaaataggatagttgggttgacagggtgggctgtttggagcagctgtactgacaggccccacctttgccttttaccctggaggccctgctaccatcagatctgactggcctgttcactcatgcacactcatcccttcagcagccttgtcctgcacacctgtcccactccagggataggcttgttctggactcacagagatgaccaggaggccctggtaaccacgggaccctggaargatgctgggaacacagctcagagctgaggtgggggcagggacactagcagttgcccacaatccctgagtccactcacgcacatgagatgcagggatgatcagggacccacatcaccctcaaagtccttgacgtccagagcacaggtccttagagttggggattggtgaccctcccaaaaccatgtgcaagaagagttccagcagccagtgggcattgtggctcttgtgggctcccagaggggtcttgagccctcatttgggcctctgagaagaaatcctgatgtgtcagggctatcatcacaggttgtgagtgctcacggggtttctaatctcagggagggggtgggaggtggcaagggctgggtggaggaagcctgagtatgaggtgtggccgcttccccttcctggcaagccctgtgcattcaggcctgtgtctgaccgttggggacatttgggggatgtttggaagcaggcctgaatgcacagagcacaccagggcagtgccaatggggacagggtagtgtcccaggagagagcccagagctgactgtgggcctggaggctctggtgagtatggcttgagaaggctgtccggtcgcatccctggtgagtccctgaggggtcctgccttcagttttgcaggacagagactggcgctggcagcccacgctggagtccagtgaatggtcattcaagctgggccctgaggggctggcactggaaccaggcagcaaccatgtgtccaggtcacttttgtggcctcttggctgtaccttccctgggacaggacacggtcctttctgtgagcactgactgtggttcsaggccatgtcattgctgcagtgacagtaaccatggtgccagccactgcacagagacccttgcccagatcatcactggtcctccaagcaggcatatcctgacccctttgaaacatttggacacctgggaaacagcactgtggggccaagcagcctgcccttgggtggagtggacctacctacccagctctgaactcatgctcccgggcccctgccacaggctcatgtcagctgcagctcagcctgctgggggatgagggcaggtgggaaggcccccttctgcagatgaggaggccagggttctaagggctaagtagttgtcacagtcatgcagagatggaagggaccctaagtggccagaccctggatgtctttgtactgtcaccagcctctctgtgaccagctccctgtcagcaggaggagcctgccgggccctcacagagcagacttggaccctgggctttacaaggctggcctcagtgtccatctcacagactgaaatctctgatcacctcctccccttttctcccgtccatggtcttggagtgctgagggaggctcagtggtggaaggagctgggcagagagccaactgtatgcccaacagcgccccctcctctgatgctgggcggtggccagggccatctctcaaggtccctgcaacgccaggcctgagggcagctcaggacaacagcagggtcatcagctgtctgctcagctctgggaagatacttccatggacaggccattcagctgctaggccaatccctgctcagcctgggaactggggctcccagcggtcggtgtggcctgtccctgtcctgactcactctgtgctggccatggttccttttctctaagaatgtggggcacagatgagcacaggggtcatgagagctgatgattctcattccaaatgcacttgtgttaactcagcattcgacaggacctgcagggccccagtcatttgtaagaaaccaaaggatcacattaaatataagccaccgatgtgttctcagagtggctgaaggagttctgtggccttataagaccatttcaggggacttgtgaggtccttcctcatccagcactgtgcttgtgtgaggctggttccttcacgggcatctgcagagatagcacagcacgaaggctggatgcagaagtgggtcacagaatccactgtctgccctggagatgacggcaccacagaggctcacagaagtggactgcaatactgtgcttctcactcattgtcttttgtttggggaaatgtcgtgatttttcataaaatgttatttatgttaacatgcagtggattcattattattttaaatgcatttgtacatgaaaaaattcttattgttaaatrtcagtagctataacccacctacacaaaaagttttagtttttagtgagtccttagtgatttcaagacataaaggggtcctgaaatggaaatgttttagagctgctgttttaatgttgtccctgaaataaacacaacagtcgtgatgataatcccagttgacactgattgatccaagtwagacaatacagggtcttagagttaactctctccaccttccatgtgccctgygaggctggtgctgctgttcctattcataccactgtacagacgagcagatggacattcagctttggccagtgccttctgcctcctgggagtgtgccctgtgggtggggaggtcagaagccccagggacacccagatgggtgagaggtccacccttcctggggagaagcagctgctggggggaatctagcacattccagagggctgtccgtgatggtctgcatggcggttaagggaggtgccgtgggaataaagggagttggggaagatgccccatggagatggcattccagccggaccttgaatgatcatcctgtagggttggctcagtgaagcagacaggagggatggacccccgaaggggaaagaggccatgagcgaggtatggggaaagggagaaggagatcartgtgagcctggtcccagccctcaagactgtgctgaccacgcaagggtgtggcctgggcgggaaggtggtggcccaggtgcagcatgtcttgccagcgctctgtggccaccagtgtctagaggtggtggagccagcagtggcrctcacagcctctgtagcnctgtctcttaccatgtgccttgcccttccctgaaggagaaccactgtcgccgcatcaagattctcggggactgctactactgcgtgtcgggcctcacccagcccaagactgaccatgcccactgctgtgtggagatgggactcgacatgattgataccatcacgtaagtaccccgtggggctgagaggagtggcctggggcatctacacattgaaatcctagaagctgagccaccttctgccccatgtgggctcccctctcagggtctcgctttgtcctgatgggtctgtctgaggctgcagagaatgatgccagcattaggaggatgctgggttcaggaargcatgaaaggatgcttccgtgattccctgcctttacrtttcgtgtgtggctgtatttctttgtccacaggaatcctgcatattgtcaggtatgcatgagtcatacaaaaataaattagtctttagcttagccagataagacatacagaaaggtttggccccaatctagctgaattctctattaaaaggaagtaaatatgtgtgtttctcttcactcagcaaggtaactgggtctcagatgctctctgtgtggggagacaggcttgggatcggggcaggtgagtcttcatggaatgaatattacacctgtgaggccaggcctgcccatttcttggtcagtcttatgttgtcattgtccttatcagagactgggatgaagacacagatgtttttgtcaagttagggaaggtgtggagctggaaggctgagctaatgtatggagtgtagatccaaacaaacatctcaaaatgtggagaggtgggtatgctccaatgagatggggccaacagggattggggcatagcttcatacctggagcggaaaagtagtagcataagaattttgtagggagatgatgggtagttgcaggtgaaaggatgcacaggcaaacaccccacccagctaggctgagagatggggcgagactgctggctccctttgccccatcactgcctcgtgggctgccccatgcagtgctcctgcagacagtgtgactggaaggaggcggttgggaggaggctggtacctcaagcattgtgcccacttctggcacctgtgtgtcggacacatgagcaaagccgagccctgtggggcagcggttcaccaacacggcttcatgtcagagttgcctgtgaaaaccaaagtccctgatggtagctccacctcaagagcccgaggtggctggtctggagtgtgatctaggactgagagtggaaaagccccctcagctgacctcagtacacagcctaacagagagccattgccccagagaaaagcagcctggctggaggagatgctgggcagaagcaggaaggaaggaaagatgcctggcgtggagaagacttagaagtgatgaccatcacctgttctctgaaaggatgggatgttatcacagcatatcatatatattgtatgttgcatctcagatgacatcatacatcaccttacatcatgtatcacttgtatatcatatgtcatatgttacatgccacatcatgtttcatgtaatatatatcacatatatcacatatcacataatctaccatataacatatcacatattatatatcacacgtcatataactgtctttcgtatttcttaatggatcacatcatatcacattatgtcataaatracattatatcacatcacatatcatatgctatttgtgtgtatatagataatatatcatatcagatctggttttgtgtgatctycttgggggaaaatgaggctctgtaggtggatgctttaaggagacagatgtcagtccatttgcttagtaaatatttgtgaagcccccactcggtgctgagcacagacmcaagcagagttgaatgatgtgggctgacctggctgaccaggtggctcgtggagctgaactggatggccttctgcccttgaaggttggtgaccctgactgtgccgagtggggtcctcctgagaggggtctgctgcttattcttggcccctggtctccttacctggctgtgtatgctcctgtgctcagtaacaccccatcttttgcttgaggttctgggccttaaagggtgctgtycttccttctactgtttctgccctgcatgttgatgggttataagctgtttctgcagacgtgcctcttcctgaccgctgcccaggaagccctgcgtctacgctctggttctgcacctggcctggagctgcctggagctgcaaacccacctggcttgctccactttctggttcacttgctccatgaacctgtgtcctcttggccagctctcctggcattccagctgctggctctcagtctgtgagattctccaggatttggtgccttcagctccacatctctacccctgctacctgaaactggtctaccctagtgccaggggcatcttcctgggcctcctgtagctgctgtctgcttgggctcctgattaccagagtgttcccagggcctcaggaagctctacacgccagagttcctgtcactcagcttcctggctctggaccggaagaaaagccaccgaagactgagcacggaagatgcctcccagccaaacagacccttcttcctcctcagactgtcacagaccctgggacccaccagtgtgtgctctgcacggccggccttctgttgggaccatcttggcatctggtgcatcccctgccagccacattgggctgtgtgtgtccctgccttgcacatgcaggatggaatatgtttatcaacagggggagcttgcccaggcagaggaggacactttatataatgtctttctcttcctcctaccttggagtggagtgttttatttgaaactttggaaatacaaagtttcaggtgaacargtgaagtggccagagctaacctttccccgcagggctccatgctgggcctcgcagctggcccactgattctgtttgctccccgccactcctcagtagcgaggtctgcactctcaactgcatttttttcctgtcttgagtctgattctgttccagaaagcccttcccatctccaaaggagcgggccatgccccaagacactaatttcagtaattgcccactgacttcctcttttaatagagtcctcggtggcaggctcagtgcctgagtgaccaggaaggagaggggcctgcaggtcagatgtgtccctttccaaggcccacagagaggtctgttccaggcttggggaattctgagtgggcagaggaaatcctaaggcacataaggaatgtgtattagtctgttgtcacactgctataaagaactacctgagactgggtaatttaagacgaaaagaggtttaattgacttgtagttctacaggctgtacaggaggcatggctgggaggcctcaggagacttacaatcatggcggaaggcaraggggaggcaagcacgtcttctcatggcggcaggagagagagagcaaaggggaaagagctacacactttcaaacaaccagatctcgtgagaattcactcactatcatgagaaaagcaagggggacatccacccccatgatccagttacctcccaccaggtcccaacattgggaattacaactggacatgagatttgggtggggacgtagagccaaatcatatcaggatggtttggctggttggaagattcttgaagcatcccatgcagattccgtggttccagaggctgctctgatagagggtgggtgttggggctccattgtcagcctcttttcaggccaatgctttgctggtagcacaagaaagaaattgctgcaggtgcaggcaagcatgcagccagagctgggtcttgatttctgaggctggagaaagtcttttccttgttgaacaagtgggaaagatcttgttttatcrctttgaagaatgtttattcctatgggaaaaacggatagacatattttccttttctgatctgtaaacctaggcctcccacgcctagcatctagtcctttttcatgcagatcggtcatttgggaagagtctaggacccgttttgtcaaatgcctgtgggcctagtgaggctccagtgtgaatcaaggtggggctgagagaggccctctgaagtgcagggtggggcatctctttgtaaagacatggtgaagaatgctggacttgaaagtgggatcccagggcccctaccttcctcagccaccaagcttagccatcctggccctctgggagccacagcatccaaaggccagagcagtgggctggggcatctccaaggctctgggctcctgcagatggccctgggcagtctgaccctgcccccagcttacttgccctgacctccacctctctctcaaacttgggctctatttaggagtgtggtatactattttggaaatgcccgttaatttttattggtatgattcttagtgaatgctttaaaagtgatatacattccctgtttgggccaggtggttcctgtctataggagagatgaagatgggatgagaagtatcctaactgtccagtgagtttggtgactgtgctggtcttgctcctgaagagctgtgtgaccctggacatgttccttttgtcttggagcttcagttttccccctctgtaaaatggccaattctgcctcatgacatcctgtctctgagcccacagagcattggaaagatgagggtggcaggaccaacctcccagctgctgcagccaggctgacaagaccaggccctgtgtcctgaggtttggggccagtccttgaccttgaatttccaatgggatttctgcaggactgcccgcgatgcccagactgcagggacacaggcagcacatcagtccctgtgtcaatctgagaccttccacgtgttaagagtcttagtctgaggcttcccaatgttccctctctgtattccatacctggaagtcatgtgtgacactcttggggcagaaagaagggggcattttctcctgctggtgaagtcagatgaggcctgaacccctccctggggcctggcttgggggatactcaggtttgagtccctctcccccactggggctttgctctgtgtgaggtctgtgctcacccaccttcttctgctcatacccctctcctctgacacrcaccaccagctctgctgctctcccagagttgccctgagtattaggtcaccctaggaagttgctcctagtcagccagttctggcctaccaaaatggcatttcatatggtttcagctacctcatccccagctgctgtgtttcttgagtgggctggggggcttctgatttcaggaacctgctagattcttggctcccatccttcaggcgatgcttcaggttcctcgagtccttaattttctttgcagtaaaatggagaaacagtgtttgcatctctgagttgttttgataatttaatgagatctcagattaaatgggcctgcatggactgggttctagcagccgctgcaagtattgattcatcagctcccagaaagagggagccggtggccaatatggcaggattctatctgaagccacatggttctgtgtacccataggaatgtggatttktctgtccacttcatgggggaagccttgttcgtcacaggtgataggcaaaccrtgaatcagattttgaacaggaacctcattcttccacatgaccaccaagtatgcaagccaccatttttgctaaatagactcaatccagatgccttgctggcagtgtgtatttttggtttactacrttgaattaaattagaagtaaatggcatgtgcttttcctccctgacccacttttgagctgctaagttcagcttgtgtgtgctgtggtcgtcagtagaacttgattgtcccccagcctgcatccctggaggtcgtgcgagaagggatgcctgctggccttgtctgcctggcacttgggctgtccccagcagtatcttactttttaacaagggggctagtgtgtgccacatggagcatgcttcagtttctcagcgcagagaaacttggaggattacttcgtctaattattggattctagttttcagagccagacctgttgatacatttagggatggattttctgtgggagaggtgatgcctgtgtgcacacacttctacaaccaccacacgtggttttccctaaaattttaggggacatggagcttctgaatctttatattctagatcgagaagctgcatttttacagttagggaaactgagtcctaggtagggaagggaggagcccaagttgaggtgatgagcttgagccacctgaggctgaaaccatttgccctgcccttcccgccacacaaggatgggggcttggaggctgctgcaggcgtgtgtgttgttgttatttctagaaattctgcctaggtgacagtaaatcggcctctatggtgtcctctcttctctttttttccccctgttatgtgcacagctatagctacagtgcttgaaataatggctgacactcagtagatgtttgttgaacaagtgaatgaatgtatgcttacctgtcctttcacttccaagcttcagtgcagccatgactaggtttcagctctgccagaatttactcacgccaaggggccaacagtggccccctctgccagaggtgggttgcttcctcatttccttcctgttggggtccagctcagaggaccaaggtcagggctgtaggtggtgggcaagtgtcagactcttcctctgcataaaaaacacttgtgataaataagtgaacctgagagcacaagtaaagaaaaaacatagtacaaataaagccaagaaagtccgtggaaattctgttccttggaaatgaagttaaaggttctgttggatttagacgaagccagcttgggcatcccaggaatggtgaaaccaagaggagtcactatgagaacagttctgggtgcatcagttttttagaagtaactgttcagttaacggcagatctgatgttaccaagaattgagatctttgaggcagaaccgactgggaaagattgaagatggagagtattggtagaacatggtggcgtggatttggttggaggctggtcgaggtgccacttgctaggagcctraaggtttgctttggtgagctcgaggggatctggggatgaaggtgggcatgggtcccagaagtctccgtgccatttactgtttcatggcttcggaggcacaaacacyaacagtgcacaaaaacgttattagtatgttatgttatttacattttcccgtactcatttccttttgtgaattttgaaaaataaattttttatttcagcgtttggtttcagtgcctcaaagaagattggcaaacaactgaaaaaaagttaaaataaaaaagtatattcagctgggcatggtggctcacacctgtaatcccagcactttgggaggccaaggcaggcagatcacgaggtcaggagattgagaccatcctggctaacatggtgaaaccccgactctattaaaaatacaaaaaaaaaataaaaataaaaattagctgggcatggtggtgggcgcctgtagtcccagctactcgggagactgaggcaggagaatggtgtgaacccgggaggcggagcttgcagtgaggggagatagcgccactgcactgcagcctgggcgacagagcgaaactccgtctcaaaaaaaaaaaaaagtatattcaaaatatgtaaaactacataggtattaaagatatatcagtagtctaacttccacataatgtaaatctgtggcatgcatacttctgagtttactgaggtttctgaacgtgtgctgggacttgtgtgattctgtggtctgggcagccatctgccttggagtggctgctggggcctccatgtgctatggtttttgggcacaggcccttgtaaggatgaagtgggtagtgatgggcagctggcaagggtttgagtggaggttggggaagcagtggggttgtgtggagcaggtgctccctgagccttggctggggctccaggaagcaggccacagtgggaagttggggtgaaggtgaaccagacacaggcttctcgggtgggtggcacagccttgccttgcatgtaccgagttgttattgacaaatgtgatatacagaggcctctagaatgggactccaggctgagctggtttgctgtcaccacctgatggcccaccccttagtccttggagcttttgttagtatttccatcccggatggaatagaaagaggaggttggcctcttaagccttgagatgtactgggttagagtttaaatgatttcaaagcttgtcaaagtgaatttagctggagctgggtgtatacacgaggaaactgaggcatagagatgggcatcgtgtacccaaattcggccaggctggcctggggtttcccagaagccctcagttctctcaccacctgctctgcctcttttcccttccctaataccccttgccatactctgttgtccccaccccagctcctggtgaatgcccctcatgtcaccagcttctcatgtctggatgtggcctccaggccttgaccataagtttgcattgaggcctaaggccaagtgtgtgtcaggaaggggtgggaggcagagcctgatgcctgggctgcagatcctgtggatgtttccagcaggttgtcatctgcatctggctggcaagcaggcatgggtccctgcgagggagcagtggcctcacagagccttatgttaatctgaactgtcctgatgccacactccacagtaatgaccaggtccacctgggatttggggactgccctggtcagggagggccctctaggaggccatgaatggaactcatgagtctggtgtggacatggtgcgagctggctgggagcatgggccagagccacccctcctgcctaaggccctcagcccacaggtgggcaggaaggctccatgtccactgactatgccaggagacctccacgctcaggccacatgcagcaaggacaagacccagtttccctggtgctcacagcctagcagtgcagaccaaggtggccccctgggaggatacaaggtgggcscyagccccacgctctgtgtctgtgttgcagatctgtggctgaagccaccgaggtggatctgaacatgcgtgtgggtctgcacacgggcagggtcctctgtggtgtcctgggcttgcgcaagtggcagtacgacgtgtggtccaatgatgtgaccttggccaatgtcatggaagccgctggcctgccagggtaagtcggggatggggtggggaggggagggaggtgggtgatggctgtgcacccctgggctaaatccttgcttcaggttctgggctgtgctcttgagggcacttgtgtgagtgctcctggaggagcctgcctgtcccagccgcacctgccaaccagactccctgtggtgggcgtcccaccmmgcctggctgccagtctgtgctgggcccagctgagcctggcgcacatctacaaaaagctgtcattggaccagaaggccagagcagatgcgtgtggggacctctgcccatggcatggtgctgtcctcatggcttgttgtcactgcatcacttctctttttgctgtctttgatttcattttctcaatgtgcaaatggaaagtgctgggactttagagctccttctccacccccaagctccacacagccatctaggagctcatggacatctgggtcacagatgatgccttctttgagctctctgagaagtgccatgggctgttgatggctgtgcaccgtggcaggctcagccttgtcttgaggaagatttccatgcacccctctgccacccccaggtcctgtaatctcccttttgtatgatctcgcagtggctatcatggcaggcagcttctccagaacactggctgcccctcagcaggcaacttttgcagaacactggctgcccctcagtgtgcccggggctcagcataaagcaggggcttcagtgagagctggtgttttcctctccccgttggctcccaaggccgggcyatgcagccgctgtcttcattgctgatggaatggatgaagcatcagctgaacacaggaatgcacagacacttgcctttctggagactgtggtgactggaagtttccagacagcctcggtgaccgttgtagttcagggccaggctgatgggggtgacagtgtccccaggtgcttccagggcccctccgggggggcaggaagcagcaagggttgaggcttgccgtgagcgccctgcctgccccaggccaatgggagctgctgatggggacacccagggagcatcccagcagggactgggcccggggatccaagcactctgagttgatgacaggaatcggcccctgtagatggggcagcacagggacaagctgaggctggagtcagaacctgcctgtgctgccctctggcccctttgcrgcctctcttcctggcctggcagtccctccctgtccctccttctcccaccccctgctcctctggggatcctggtggagccactgctgggaaaggcctcgtgatctcctgagccctgtcctcaccctctcaggatcccagtgagcatggcagctctgccttcaactgcctcctatctgagccaggctccctgctttcgtcctcagccagccttagagtttaattatgaatcccaagcttttcccctgcgaggagttcagaaggttgtgcggtgaagtgaagaactgggtttgcagggaatggttttggaaggtggggagtttgcttctcgccccataaacctgcgagctcaggcgtgccctgctaaggagcagagactgtgggtgttcgttttctgctgagacgatgccaactgtgggggattttcctgtcctcaccagaagattgggttggggaggcgtgaatgcctgggctccacagcgtttcttaccaccctgcttcccaccccacctcatgtgtgaacaccgtggccacccctgacttcttgctacccagtggggtctgcccactccttgtgctgaccagaccagaccatggctggggagggactcccatgtctcctctcctctttctcttcttcacatcactgcccattttttcctcaacttccctaatgagtcctgatgtattctttctctctctctcttggttcctctgctctccctctggccctgtgtcccccacctcagccatccctgctgtcctgctgggcatggttcctgatggccctactgtatctgcctgggccctccctcctggcatggacggacttgcatgggagcatgaatactccccgtggagcctgccctggtgtggggaagcctctgtctgtgccccttcccctctggtaaggccctgcagactctgacagcagtggttccccactcatctggcctctgcctcctccttttgtaggaaggttcatatcacaaagacgaccctagcgtgcttgaatggggactacgaggtagaaccgggttacggacatgagaggaacagtttcttgaaaactcataacatcgaaaccttttttattgtgccatcccatcgccgaaaggtaggcaccagagcccccctcatttggttgatccttagcttcttggcctgtgcagagctttacagatgtgactcctcctgcttcctctccaagcactgcttctctgggctgtgaacttgctaagatggggagagttgtccccactgacaccgtcctgagccttgtctcttactggtgtggggaggggtctaggtaagggagccagaacccctagtcagagatctgggatcacctcggggcaggccgttctgtgtcctccttccccttcctgggccttcactgcctcccctgcaaagtgggcatgaaaccccgcaggggggccagggatggggagctctgtgaactgaggggtgctgggcacagaggtgggctgttaccgtcttacatggggcacttgaggtcaccctgcccagagaaaagtggtctggacatgatcaagagtgatcaagtcactttcagggtccatgtgaggggtcaggctcaggtgagggtgcaggactcaggtgaggggttcaggctcaagtgaggtgttcaggggacaggtgaggkgttcagggctcaggtgaggggttcagggctcaggtgagggtgcagggctcaggtgagggtgcagggctcaggtgagggattcagggctcaggtgaggtgcagggcttaggtgagggttcagggctyargtgaggggttcagggctcaggtgaggtgttcagggctcgtgaggatgcagggctcaattgagggtgtagggctcaggtcaggggttcatggctcaggtgagatgttcagggcttaggtgaggggttcatggctcaggtgagggattcagggctcaggtgaggggttcaggctcaggggagggtcgatgcctcaggtgagggtgcagagccattactgtgttggctcttcttaaagaaacaatttgtgggagctagtcattgtgcaccccagtggatgcaggcccctgggctctgtcacattgacatagacaatagtatccagtcctgtagtttgagggtgaaagggggtgacaagataggtacagtatacagccccactttagagaagtttgaatagcgggaggggaagagtgagaatgctcagaagaaggggattttgttgttttgaagagtggagatttgtacctacctgtaggggccagagaaagtgaagttgagaggtaggcagcgaggccaaggaaggggtaccgcattcctggagaggagatggggtcagagctgctgtgggggtgcaggaactttggactcactcagaagacaggccggccagcaggaacgatgacagtggagcattcatggggtcccactttcctatcacctcatttgaccttgagaaggccccagcgggtgagtgggtgatgttcatccgattttacagatggaatttcacccagaacatgaggactgtgagggaattgaggttctgagcctcagctgggtgcactgcccagccctccccatcctccccatgcgatttctttccttgtctgtagaaggggacatactggaaactgaacggggtaacaaagaccttcattccaagccctggttgtctttcctgaccagggcctccagccttcccccgcactttgcttcaggattccgagcatcacgtaggcttttagaggcctttggtgcggattgagaatggaacgttttggacgtggccctcccaatatggttttgtttgctgctctattctgggcacgttccccaatgcctggcttgaagtaggcgctgagcaaatgaatcccagtgccctggggtggctgtgtttgtcaggatggcattcccagtccgagaggcacaatgtgtctcattcacagcatttctccttgccccttgtgtgtttggacagatatttccaggcctgattctctcagatataaaaccggccaaaaggatgaagttcaagactgtctgctacctgctggtgcagctcatgcactgccggaaaatgttyaaggccgagatccccttctccaatgtcatgacctgcgaggacgatgacaaggtaggagcagccagggagcctgccatgctggagctgccagggactgatctctgtcctgccctcccaatatggcccccgtgccatttggctagatcagaattccctgttcacatgtggataatcttgtaaatgctgctcagagctgagctactttttatttcctgcaaaagtcattatagtgtacttttttactccttggcattctttgtatttgtccataatccatgtatttattcctgtttatccataaattcaagctaaaattccccacctgctgtctaaatggcctctgagggtattcattctggacagatgtgctaggccctccctccttaggtggatttcacactaaggctggccctacccacctgtcatccttgcccccagcgtccaagcctgtgcctcatctgtctgtgcctgtgcggcttcctggctccctctctatgcaggagctcgctgcctgcagatggccttcctctgttactctcggttagcagcccagccaggacgtccagacgagcaaaacagcaaaacagtcttctcagcagtctccacctctgacccctcgcccgcagtgcctgattccccacccccggaccccaggcttcccagctttgcgtcaggtgctgtgggcagggcgagcccggaagcctggaagcctgggcttttgcagttccagtgtcaccccttcatcaccatctgccccccagacagggctccatactgctgctgccttgtgatgagtgaaagcaagtcagaaatggggaggagaatagcgtctccactgcaggagccatcaaagggtggtgacagggcatggcaggcaggtagtctctgcagagatgtctgtggtggtcccagtagggcgtgtgcctaggacaagaggaacaggtgcagtctgtgtgcacagagcagccccaacctgcagcagtcaccctctgcaggcgtccaggcctgttaccactttcttctctgccgctctgctacccgcacctccagactcagcccaggcctgccagcctcagcgtttgatggagcccagccttggagctggagttaggcgtcaggtgggaragtgcatgtgccgtctgtgaccttggtgcagctttgtgagcaaacgtgtccagagttcaggggaatgtcttacaaaggctcttggacagactgggaccacctcaaactgtcctcttcctcagggtccctgttccccagctgtgctcattcaggggtgtgggagccagggcagaggggactggcctctaggtggcggtgttgcacaagggcccagtcgcagccaggcgggcgggagctgttaaaattatttggctggatcggtgggctcatgcctctaatcccagcactttgggaggccaaggcaggcggatcacgaggtcaggagttcaagaccagcctgaccaacatgatgaaaccccatctgtactagaaatacaaaaattagccgggcgtggtggcacatgcctgtagtcccagctactctggaggctgaggcaggagaatcgctttaacccgggaggtggaggttgcagtgagccgagattgtgccactgtagtccagcctggatggcagagtgagacggtgtctcaaaaaaaaaaaagaaaaagaaaattattcagtgacacttgctcaaacatagtaagatgctctgtatgtgggaccatagctrtagcataggaaccacggcagtggaatggagtcgtgctgttgsggggagaggttagactcagctcctaacagaaggaggggagtgagggtcagtggatggaaaatttctaagaggaaacataggggtaaggggattgtggccaactgacctagcacgattcttgctgaagacaggcctaggtgatcaggcctcccctgggggctggtggagggtgaggaacctgatcagataggtgggggatgggatattgagggtggggcgttcctgctaaaactggattttacaaggaagtgcaccgttgggcctaggagaagtttcagagcctggctaaaatttggtcaagcagagaagctgtgtcggaccccacacatctgatgcctctcctgtaggttcagatccatccctcactgagtggcctggatgtcctcctggggttttggtctcccaccctgcaacggggacgactgtgcacrtagcttcaggtcctgcccaacagccactgtcaccagtgctgcaaggatgagctcctgccatcagcccttatcccccagggcattcacgccagctctgttcttctctcagcactctctcctgatcgtaaacataattgattatggaaaatatggagaacacaaagatgcacaagggagaaaatgaaaagcatttatctggaatcctaccatctcacaaaaaagctatcatgaacattttgttccttccagtttcttaagtttgtgtgtctgtatttttttaataaacttgactggatggtacacaggcagtttggttgcttgtttttttttttaattgccaatatatcataaacatttccttccattattaaatacttgccaaaaatatgattttttggtccttattttactttaagttctgggatacatgtgcagaacgtgcaggtttgttacataggtatacatgttccatggtggtttgctgtacccatcaacccgtcatctaggttttaagtcccgcatgcattaggtatttgtcctaatgctctctcttccctttcctcccacccgctgacaggcctctgtgtgtgatgttcccctccctgtatccatgtattctcattgttcaatttccacttatgagtgagaacatgcggtgtttggttttctgttcctgtgttagtttgctgaggatgatggtttccagcttcatccatgtccctgcaaaggacatgaactcattcttttttatggctgcaaaaatatgatttttaaaaatcattatatagatttgcagcctaagaaaccatttacttaatcaacctccattgatatttaggttatttctgttatatttaaatgaagcaaatcgtggacagagcttttggtcatgaaaatacgtttacttctctgatggttttgtgtaatggaatccagagagtcaagtgtctgcctgagtgtgtgcagcctgttagggtagttacgctcatcgcccactgggcccaccaggtggggaacatgacattgcctgcctgagtcaccgtggracacgtctctattccagtttcctaatacctggcagcacagttgtctcctctaataggtacacccagaagcctcccaattcagtctctctctctttttattgagcgcttcttttgttcttctcttcacacttaaatatttaagcttgaattaaaaaataaaagcaacatccacacatgatacaaaaattaagtcttccaaaatgtttgccattttgtatttccttctagaaaatcaatttgggtgtgcaccagaggttaatgcaaatagaagtttatcattttgtcttccacaccttttcactaggtgacagactttagaaatcttggagtcatttctaagtggctggatggcctcccactgcaggagggagggagggatgtgactttaccactggcttgttggttgctggggactttatttctagaggttgatctcatgtctrctggtgtcatgaacatcttttttcacaaatgtcttagtaaatcttacgaggatagcctaggggtatttctttgtagtggaattgctgggttaaatggtgtgtctgttttaattttggatagctgttgccaaattgttctctctcaggcacttgctgtgctcgctcgcaccactgatgcacctgagccttggtttcctgaatggagtcagctctgtgttttagcatggtttaaaaaatcaccagtatgctcaatgcagtgtcttttcttttctctctcttttttttaaattatactttaagttttagggtacatgtgaacaatgtgcaggttagttacatatgtatacatgtgccatgttggtgtgctgcacccattaactcgtcatttacattaggtatatctcctaatgctatccctccccactccccccacaccacaacaggccctggggtgtgatgttccccttcctgtgtccaagtgttctcattattcaattcccacatgtaagtgagaacatgcggtgtttggttttttgtccttgcgatagtttgctcagaatgatggtttccagcttcatccatgtccctacaaaggatatgaattcatcattttttatggtattccatggtgtatatgtaccacattttcttaatacagtctgtcattgttggacatttgggttggttccaagtctttgctattgtgaatagtgccgcaataaacatacgtgtgcatttgtctttatagcagcatgatttatacccctttgggtatatacccagtaatgggatggctgggtcaaatggtatttctagttctagatccctgaggaatcgccacactgtcttccacaatggttgaaccagtttacagtcccaccaacagtgtaaaagtgttcctatttctccacatcctctccagcacctgttgtttcctgactttttaatgatcgccattctaagtggtgtgagatggtatctcattgtggttttgatttgcatttctctgatggccagtgatgatgagcattttttcatgtgttttttggctgcataaatgtcttcttttgagaagtgtctgttcatatccttcgcccactttttgttggggttgtttgattttttcttgtaaatttatttgagttctttgtagattctggwtattagccctttgtcagatgagtagattgcaaaaattttctcccattctgtaggttgcctgttcactctactggtagtttcttttgctgtgcagaagctctttagtttaattagatcccatttgtcaattttggcttgtgttgccattgcttttggtgttttagacatgaagtccttgcccatgcctatgtcctgaatggtattgcctaggttttcttctaaggtttttatggttttaggtctaacattgaagtctttaatccatcctgaattaatttttgtataaggcgtaaggaaggggtccagtttcagctttctacatatggctagccagttttcccagtaccatttattaaatagggaatcctttccccatttcttgtttttgtcaggtttgtcaatgatctgatagttgtagatgtgtggcattatttctgagggctctgttgtgttccattggtctataactctgttttggtaccagtaccatgctgttttggttactgtagccttgtagtatagtttgaagtcaggtggcatgatgcctccagctttgttcttttggcttaggattgacttggcgatgtgggctcttttttggttccatatgaactttaaagtagtttttttccaattctgtgaagaaagtcattggtagcttgatggggatggcattgaatctataaattaccttgggcagtatggccattttcatgatattaattcttcctatccgtgagcatggaatgttcttccgtttgtttgtatcctcttttatttcgttgagcagtgatttgtagttctccttgaagaggtccttcacatcccttgtaagttggattcctaggtattttattctctttgaagcaattgtgaatgggagttcactcatgatttagctctgtttgtctgttattggtgtataagaatgcttgtgatttttgcacattgattttgtatcctgagactttgctgaagttgcttatcagcttaaggagattttgggctgagatgatggggttttctagatatagaatcatgtcatctgcaaacagggacaatttgacttcctctttgcctaattgaataccctttatttccttctcctgcctgattgccctggccagaacttccaacactatgttgaataggagtggtgagagagggcatccctgtcttgtgccagttttcaaagggaacacttccagtttttgcccattcagtatgatattggctgtgggtttgtcataaatagctcttactattttgagatacatcccatcaatacctaatttattgagagtttttagcatgaagtgctgttgaattttgtcaaaggccttttctgcatctattgagataatcatgcagtttttgtcgttggttctgtttatatgctggattacgtttattgatttgtgtatgttgaaccagccttgcatcccagggatgaagcccacttgatcatggtggataagctttttgatgtgctgctggattcggtttgccagtattttattgaggatttttgcttcaatgtttatcagggatattggtctaaaattctcttttttttgttgtgtctttgccaggctttggtatcaggatgatgctggcctcataaaatgagttagggaggattctctctttttctattgattggaatactttcagaaggaatggtagcagytcctccttgtacctctggtagaattcggttgtgaatccgtctagtcctggactttttttggttggtaagctattaattattgcctcaatttcagagcctgttatttgtctattcagagattcaacttcttcctggtttagtcttgggagggtgtatgtgtctaggaatttatccatttcttctagattttctagtttatttgcgtagaagtgtttatagtattctgtgatggtagtttgtatttctgtgggatcggtggtgatatcctctttatcattttatattgcatctatttgattcttctctcttttcttctttattagtcttgctagcggtctatcaattttgttgatcttttcaaaaaaacagctcctggattcattgattttttgaagggtttttgtgtctctatctctttcagttctgctctgatcttagttatttcttggcttccgctagcttttgaatgtgtttgctcttgcttctctagttcttttaattgtgatgttagggtgtcaattttagatctttcctgctttctcttgtggacatttagtgctataaatttccctctacacactgctttaaatgtgtcccagagattctggtatgttgtatctttgttctcgttggtttcaaagaacatctttatttctgccttcatttcattatgtacccagtagtcattcaggagcaggttgttcagtttccatgtagttgagtggttttaagtgagtttcttaatcctgagttctagtttgattgcactgtggtctgagagacagtttgttataatttcagttcttttacatttgctgaggagtgctttacttccaactatgtggtcaattttggaataggtgtggtgtggtgctgagaagaatgtatattctgttgatttggagtggagagttctgcgtattttcttctctgtttctgatccacctaggggctctcctaccccatctcctgggcattttgttgaaacatggctggaaatttttttaaaatataacttctaccatatctatctgaatttaatgaagataaaatttcaacttgtttggtccacactttttgaaactgattgccrtaatgttttacttaattctgttgcatttttttgatctacaatagtatgtttttcaaatggtgataattttgctttctccttttcatcctatgttaaatgattgcaatagggtgggcattcttttttgttctggctttaataaatagggttttaccactaattgtgatgctttgggttagaagtaatagtatatggctaattatttcaagaaagtgatccattkgagttagcttttgaattttttcttttaataagcagatgttgaattttagaaaatactcttgagtaggtattaagatgcttagcctggtggttccccctctgactgttaatatggtcagtgatatcactgcatcctccagggttcttttgacattgtaggagcttcaccttcctgtccatccctgtggccttgggctgttcctggtacattttcagagatgtgtgtatcatctactcactgaaggacrgctaccttcctctcaatgtgttggccactctcgtggatgcccgtcacagcccaggactgtgatttatgactgtggaggacagtcagtaacccaggacacagcaggtgagctgacaggcagaggatgctgggtggtgacagggtttggaggtgtggctgacctgagggtggaccaatgtctattactcctgacttgagggaggatccatgtccattagcaccaaccggaaaatggacctgtgttcatcagccccgaccacagggaggatctgtatgcctcagtccctgacctgaaggagaactcgtgtccatcattccgtgacctgagagtggacctgtgtccatcattccctgatccagggtggacctgtgtccatcattttctcacctgagggtggacctgtgcccatcagccctgaccacagggaggatctgtgtccctcagtccctgacttgatgttgaagggtgaacctgtgtccttcagtccctgacctgagggtagacttgtgtggatctgccccaactggagggtggacccatgttcgtctgccccgacttaaggctggacatgtgtccatcagccctgacctcaaggtggacctgtgtccatcaacccttcacgtgaactctcagaactgtcagaccagggagcagttggcactgaccactggtcttctgaacaagcccaacctcaggtagataaccagtgaccggcagggaactcaagtcaaggtctgcttgtttggggttgtagcctgaattggcaatggaaaagctgctgggcgcagcagagatttgcgctggcaaggactctgagcatggtttcctcattatctccagcttcaggacagaggttccccttgagtatggaagtttttacctggaatcatccctctaaatggtatcatacagtatgtgatctctgaaattgggtttttcttcatccagcattatgcccctgggatccatccaagttgtgtgtgttaatagtgccttcctttcattgctaaatagtccttcatggtatggatagaccactgtttgtttagtcattcgcttgttgaaggacatttctgtttccagtatttaacttttacaaataaagctgccataaacattgtcgtgcgaaattttgtgcgcacatccatgttaactcatctaggatagatgcccagatgtgtgattgatgggtcatgtttagatttttttcataaactgccgaactgttttccagagtgtctattttatatccccatccccagtgtatgaaggatccagttcatctccatcctcaccagcatttggtgttctctctctctctctcttaaatgtagctgttctaataagtatgtagtgatacttcactatgattttattttggcatttcactgatggctaaggatgttgaacatcttttcatgtgctcattttttatccatatgttctcttgccctttggtgaactgtctcttcatgtcttttgtctgctttctaattggattatttgatttttttgtgctgttcatttttgagagttcatggtatattctagaaacgattcttttgttagaggtgtggtttgcaattatttcctcccagtccatagcttgtcttttcatcatctcaacagggtcttctgttctgtttcacagaacagatgtttttagttttgaagatacccaatttattgatttttctcttttatgattcatgtttttgatgtcatgtctaaaaaccttttacatagcccaagtccccaaattttgacatacattttactctaagaatcttatagttttacatttgatagtttatgatccattttgagttcattttttaataaggtgtaagtttcagttattttttagattttatttttgcttatggatatctggtttctccagcaccatttgttgataagctatccttcctccattgaattgcttttgaacttttgtcaaaagtcagttggccatacttatgtgaggctatttctgggttatctattctgttccatttatctatttgtctgtctgtctgccaacaccatactgtcttgattaatgcagttgtataagtcttaaaatcaggtagagtgattcttcttactttattgttttaaagaaaagtgggctattctagtcccttttcctttctgtttgcatgaacgtggtatgcctcttcatttatttagattttcttcgattccttacatcagcattgtgaggtgttcagcatacgagacctcgctgtgttttgttagatttacatcttgtattttatttttctcagtgattataaatcatactacattttaatattggtcttccttttttcatcactaatataaagaaataccattattttttacgtttatcttttatactgtcaccttgtggaactcactaatttgttctaggatttttttaatatatatatattccttgagattttccatgtagatcatcatgtcgtctgaaactagagacaattttctttctttcccatctgtatgccttttacttccttttcttgccttattgcactggctggggtttttagcactatgctgcatggaagtggtgagagccaacatcttgtattttatccagagcatagaaggaacgtgttcagtctttcacgattaagtgtgatgttagctataggcattttgtagatgttcttaatcaagttggagaagttccccctcaattcctagttttctgataatttttatcatgaatgggtattgaattttgtcaaatggtttttctgtatcaattgactttcctctttaaccagttcatctggtgggttacattgatgttcaaatatttgaccagcctttcatccctagaattgtttattctatataattctaattatatattactgaattttatttgctaatattttgttagattttttttatatctacatccatgagggatattggcctgtagttttctgttttgtactatcttcgtctggtgttggtatcagggtaatactgactttgtaaagtgacttgggaagtgttgcttcctcttctattttctggaagagattggttaaaactggtgttaattctttaaacatttgctagaatttgtcagtgaaaccatctgggcatggagtttactttttcaggaatttttaaattataaagtcaatttctttagaaattrtaggatttttcaatttaccctttatgttggatgagttgtggtagttgtgtttcaaagaatagttcatttgatctaagttgtcaaatttatgtgtgtagagttgtttataatattccttcattaaccttttgatgcctgcagagtatgtagtaaaatttcattttatttctgaatttgttagtgtcttttcactcttatttttcaggcttgcagtgatttgccaacttgattgataattttcaaagaaccaacttytggtttcattgattttctctattttttttgttttctttttattgaattcttctctttattatttcctttctactgttagctttgagtctattttgcatttctttttctagtttgttaacatggcaattagattattgatttgagactttttcttttttcttatgtaagtatttagtactattaactacctttcagcactgctttagctgcatcccgtagattttggcatatgttcattcagatgagcatatatatatatatatatatatgtttttgttgttttttttttttttccttgagacttcctctttgacctgtggctaatttagaaatgcttggaaattttcctgttatctaactgttactagttttagtttgattctgttttggtttgagagtacataatgtgtatgatttcagttattttaaatttgttgagttttgttttatggccaaggtctcttaatacatactcttgggtacctgaaaagaatgtattctgccattgttgcatggagtattttataaatgtcaattagatcttgtttgatgatgtcttagcttattttatgtctgattgttcaagggagatgttgacatctccaactataattgagaatttgtttatttctccttaaattctcttttcttttttttgagayggaatctctatcacccaggatggagtgcagtggtatgatctcagctcactgcaacctctgcctcctgggttcgagcaattctctgcctcaccctctcgagtagctgggattacaggcacccgccaccacgccctgctaatttttgtatttttagtggagacggggtttcagcattttggccaggctggtcttgaactcctgacttcgtgatccaccccacttggcctcccaaagtgctgggattacaggcgtgagccacagcgccccactgtttctccttaaattctatcagttttggctttgtgtgattgaaatttctattgttttatgcatacacatttaggatttctatgtcttccttttacattgactctttaatcattttgtaatgtctctctctatccctggtaaatttttttgctctgatatctactttttctgttatcactacagccactcctactttctttagattaaagtttgcatggtgtataatttctattctattaatttcaacttacatatattgctatattttgaagtaagtttctttaaacagcatatatttggatgatatttgttaaatcatttattacagcctcttttaattggtatatttagaatatctacacttaatgcaattattgatatgttattgataagtctgctatttaacttattttttgtttttctgtttgttccttctctttttgtctgttttttttcctatgttgctgtggtttatgtgagcaatttttagaattccattttgatttatatatagtatatcttgttgcatacaattttttgtagtttatctagatatgtattatttttacataacattacagcctactgatgtcaacattttaacaagtttagtgtagaaactttacctctytttcagtccctttatccttccccatttataacataaatgtcataaatatttcctctatatatatcagacaaatttataatctttggttcaaccagaaaacatgtagaaaattcaagagaaggaggaaagtatattgcatttagccacaatttttatcctttctgtyatttgtctttgtgatgttccaacattccttcttttactattttcttttttgtttcaagaatttctttttgctcttctttaggttgattataaactctcaactttcctttatctaaaaatattataatttttttttcatttctgaagtataattttgctagatgttgaattctgggttgacagttcttaagcacttgatgaatgttttcccacttttttctggcttccatggtttctgaagaaatgatgctatcattctagttactttttttcctcccccaaaaaatcagatattagttttctcatgctgctttcaagaattttcctttgtcttttgttcttggaagtttgattgtgatgtgtgttggcatctgtttctttgagtttgccctgtttgagatttgctaacttacttcaatctgtacgtttatatcttttgccaaacttgggacattttctgctattatttcttctaatatttgtccagtcttacaccctttttcttcctttcgggactctgatgacatgaatgaatgttaaattttccattttagttccacagttccaaaggctctgttttgttttttttttttaagtctgttttcttttcattgttcagattggataatttctgtgactctgtcttcyaggtcaggaattctttactgtgtgcacttcagtctgcagttcagctcatccattaggttttaaattttgattattgtatttttcaggtctgtaatttttatctgttctttcttatactttccttttttctgagacttgctataatttgtttcaggtgtgttcataattacttattgaagcatttttataatgactgctttaaaattcttgtcagataattttaacaactctatcatcttgaagttagtatctgttgattatctttctcaagttgacattttttaaggcttgatattatgagtggtttctttttttttatgtcctagacatttgggtattatgttgtgatactctggatcctactgaaattttttgttttagcaagtctcttcagactttacagcattggggcagtgtgggtggaattccgggtttcccacttatcctccatgacagcctggcatttggcaccaaggtgatgcctggcaccttgttactgttgagtagaatatggacattctgcatccttgttcagcatccactgacaatgcaagtgggagctcattaccactcagtggagatgagcatctccactccctgttcaggtttttctgacactatgtcagtggggccttgggtgtgcctcctcacagcctaataaagatcaaagtcgaggctccccacatggtctttgctggcctgggtggagctggggccacagattttttttttttttttktatggtctttggctacaatagggtggttattgtctaaaagttttgttttgctaggttgcccctttttttttctttggctagaaacaacaggcttttttgtaggggctttaaaaaagttgatctgtatccagtggcatwttttggctgctggtttctcttgtttctagtctgggataaataaggcagaaagaaacctcaagggacaccayccacccgacactgttttcctttgagttgcaaggtccctgcgatcaccctcttctttccacctttcacagtctgtgtgcttattttacatgtattgtcagtgcttttaccactcagtaggaataaaaacaagtgtgttcatttcatcttttctggaaccgcatggctagcctcttttaatattcttattttcttctcaagtatattaagtaccagaggttctgtttatgaagcactgatagtgagttcatggcaagtggttttaaattagactctattttccttttggcaaatgggtgctttctcgtatccctcatgtgacatatggaagctgtggaggagaggctcactctctgttcccatcagccctggccagagtgagagactggtgaagccactccgtttgccaccgtttctctctcttagaaggagggggttggactcctgctcttgtaactctggggaatctctttctgcatgtgttggggttttatgagtttaggaacctgctcttactgggatgctgttctccccactgcaaacgtgtttaatcacctaatccttgctgccatgccatcactcaggggccataaaaccgccattacaggtgtgggaaccccaacactggctgctgagatgactcacctgccatctcaccaccagcagggcagagtcatgattattaaatgtcagattcccaaacccgaccccaccctgcagcggatctggctggagggagagtacaggtgcttttcttcaataagtggagaatttgatgatactcctttatttccatgatggctccagcggagggcattaagaacagcctcggaaaaactcagaaaccgctcatctttttctaccaacgttgtctacaccaccccgggcactcgcgtcaacaggtacatcagccgcctcttagaagcccgccagacagagctggagatggcagacctgaacttctttaccctgaagtacaaacatgtcgaacgggagcaaaaggtragcaactctggttttcggcttccctggtgctgcttgcgaaggcgcygcctggctggaggaagccctcagccctgatggattgacttctctcttacacagtaccaccagcttcaggacgagtatttcaccagcgccgttgtcctcaccctcatcctggctgccttatttggccttgtctaccttctaatattcccacagtgagtatttctatcaacgaggtgaggaactcaccaagaagtcccggtttctggggttcgtggttgtgtttctggggttcrtggttgtgtttctgttgtatgctcaagcttcgtctcccacagttattgtcccaatgtgcccaacatggctgacattagccagccatcatttcctcattttctcaagtcagtagtgtaacaagccttgatggtatatggcatgggactggtcactttccattttaaattttgaatttacttaattctaagacacaatatattttcatgctttttcatccatgcaacatgcaccattgctgtaataatagcttttggctgggtgtagtggctcatacctgtaaccccagcactttgggaggctgaagcaggaggattatttgaggccagtagtycaagaccagcctgagcaatatagcaacactctatctmcaaaaaaaaaaaaaaaaaaaattagccaggcatggcagcacttgcttgtagtagtcccagctactcaggaagctgaggcaggaggatcccttgagctcaggagtctaagctgcagtgagctatgatctcaccactacactccagcctggatgacatagtgagactttgtctctaaaaataataataataataataataacaataacttttgagaagaaactgcacttaatgagctcattggcttctaaatccatgtcattttcaaaaacttaaaatccctcttaaaaggaagaaaaacagtagtttaaataacatttaaacatcatataagtaaatgtgagtttggcagcttttattttattttattttttttgcaagaaagacaccactgagtctgcacttgccactttactttcaagtgtactcatttcttaataaaacctacctacgggaatactacctcctctgagtttgaaagcacatggaggccaccccacacctgcggaggaggagggagttcagccctgggtgctctgcatcctgcccagcccacagacactgaacacagcagcctgcctcatgggcctatttgggatttaagcgttttctaaaaatgyccttcccagacaaagcccagctagagaatagctcagcaaagtctgggaaactcttgtctttccatcatgaggaaaacggcttccagaaaagttctgtgattctcagcctaagctagatctctgcggtgggggtaggagaagtgggaggtagactcaggaggggcccccttcttactcaggaaccccagatgccctgccctaaaaaatagaaccagccatgtcagttcccagagacctgagtggcaggcatccaggttaacgatgctgcttcctcctgagagcacaggggatgtggagggaggggccaattctcagccatctcttgggtccgcctctcctaatccccacctatcagtgactctcatgttttctgtcccccaggagtgtggtcgtcctgctcctgctagtattctgcatctgcttcctggtggcctgtgtcctgtacctgcacatcacccgggtccaggtatgtgggtggcctgtgtcctgtacctgcatatcacctggttcatgtatgtgagtggcctgtatcctgcacctgcatatcacctggtccaggtatgagggtggcctgtgtcctatacctgcatatcaccttgttcaggtatgtgggtggcctgtgtcctgtacctgcatatcacctggtccaggtatgagggtggcctctgcctgccctctgggtgggatggggtgggataggggaggcagttctgttccctcccctgcctagacaggaagaaagagtctgctcatatagcaggtgctcatgaagacccagttctgcactgggcacatgcactcctttgggagtgtacctggtgggcacaatagactggcgattgatattgattaaacaaatgagcacaagatactgatcctgttctcttggaatggagagtctagcagcaggacagaagagggatgtttattctgtgtttatgtcacagactttggagaggggtgacattttccaggtacattgtgctatctgggccctgatgcctcatctgctttgctctgtgggcttttgcaggaaagacgtgagctttgcggccttgtactatctgtggctcacttggaggactgtatagttcctagtcctgcattccttcatcacattctccaccttcatttctaaacgactcgtttccctcagccgaccccaggatgtcacttctggcagacccagtgttatatttgcataattactgaaaacagcaactttttgaaaagattaaatctagtttcattcatttaactttgtcattattcataggtaatatcttgagtttttaaattaaaaaaatgctaactattaaaacttcattcctatttctttgacttgtatagattgagtgacatttggtttgacaaattttaaaatttaccacttcaagtaaaactgctgtttttcatataatttcaagtgaaagcaggacagaaggatgatagtttttaaagcctattccttagtcctcagtggtgggaaccagtgtgcccacccaatggtgtacaaatagcattagacatgcagaaagtgtgaaaagccattgggcaagaagagcgatgacaaagcagaagccaaggaatgcgccagcctggaaagctctgcccaaaggtcctggcccaggaatactgattcttgcgagtggatgtacactgctttctgtgactccacgagagcctcccaagccaggtggtgagacgggtcagcccctttcccacatgtgaggaaagtgggctcaggcaggctaagggatgtgctcatgaaaccaggaagcaaaatctgcacccaatctgtccataaaaataatattcaaattaagaaaactctcggttctaaaaaacacatgatctgtgggattggggcgctaagtcatctgcccagaattaccccccttttgttaataagggagctgccctcatggctgggaactttggccagaataattccaggtgctgacattaaaggaggctagcctgcagttatcccatgaagcttcttctgtattccagtgttttgttctcttggtggactctgccctggatgccactagctcctttccttctgaatattcactctcccttctcaccctcttctgtgagcaagcatagagcgttttttcctaagtgtgtggtttggaggtgctaggttcgaaaagcagtgggggtccagctttcctgggagtgccatcagtggtgcttgcggctgttgtggaagaagcagagtggagactaagtgcccagacttctcagctaggacaggagaggggattcagctcacagccagtgtgtactgggtcagggtttgattgaatcacaagtatttaggctcctgttcgcaggctctgcaccgggctctgagcatccctgctgaccctgggccagggaagaggcctgtgcaaatggctgtgggaatggaggtgagggaggtttgcaggaagccagcaggggataggtcagggccacccagcagaaggccattgtggcctgagtggacgcggtgggtcatgcagacggagttagttccagaacacatccttgagaaggccgggtagaaatgtttccctccccgacattgacagtgtccagagccagggtgcccagggcagtgtggcagttccatggccccttgggaccttcacccctatctggtttccccatccccatccctcgggggtatgtcaactccaggcttgggctccagttgtctgggcctcagggttgccctctgtgaaatggcggtgatgatggcccccacctcactggcttgacatgaggattcagtgagctcatttgcacaaagtctgtggagcagagcctggcacagcacacgctcagttggagtgttctgaagtcagatgagacagagaagctgcatgggggtggggcagtgggtgtagctcatcccgggaatcagggtggggaggtgcctaatcctgtccatcttgaccatctgcagagggcggcagagctgacccgagggtcctgcygagggttgaaaaggaatgtctggggcaggatgtggactttttctgtcagggttgcaggctgaggtttgcatggctaggcctggagaacatcaggagcgggcagaggagaggaggaagcccaggaggtgtgcactggctggaccccggggtgctgcaggtggggcaggccgaggtcaaggcgtcaggcacattcagaggcccttggctggaccctggggatgtgggcacaatgtggtccacaaggtggctgggtgtgcctcggataagctgcttctgcttctcccaccctggcctggtgctcacagacctgcatttcagccctgttttccccatcctccttctcgccgtcctagggctctaagagaggcagatgggacaggctcaggagggtgttgggcccacccaggctggctagggtagaggccgcatcccatcataggtccccaagccaaggtgtggaaggtggtaggtggtggaaggaagattttcaccagttatgatactcgagttaaactaggtggctttgaagaaaagagaaaaccttggcagagatccttaaggtagggggaagggagcctcaccgcacagaggggagtgtagcaccatcagagacagcccgagggcttcattctagcccctgtgagtgcagacggtcaggaaatggtgcctgctttttctccctctcatcctcagttgacatcatctcccgaagtgccacaatggccactttgttcatgagcccattgggatgacaggagtggccgaggaaatagaatgactggtgtccacagtaggggttgtcctatccactggatttgaattctccgctgcttaggtcaccctttagtgaacattcatatgggacacagtatcttaacatttttcacccacttggagaggtttatctacatacttttcccccagacccccttgtcattaattttccaaccatgtctttcccaactccctgaacatccagccaaaccgttgtccacagcttatgaatcagtrtatgactacatctcaccatttctccttggaaacaaagtacccacccaggggaamtgcccaaagttctgcccaatgggaggatttcccttcaccattgtccctcagggctgtgtcatttgggctgaagtgctgcagctgcccacaaggcctgagcttctcttactctgtcacctaatcagagggagctccccatgaggccataggtacaggctgggagagagaaggcagggtagcaggactggggactatggtcattggggccattttgtcgtgtcacttacttgtgccttaagggtctgctcggagctgatcatatatattagcactttcatttgatgatggagggctgctgttcacacccagctttatggcttggtgggtcaggtaacgcccagttcatgatgggcagctcaggtcatgcggtaacttggcccacaggtaggggttcaggctctactcaggcccagcggcaggccaagaggctttctcaaaaggagaatagttacctgcaaaagatggcaggatcttgctctaaaatcctgttcccaggcctgtggtatggctcccgcatgggggcctgccagtggctctggtggcctcccttagcacaccgagctcacgccaggtggaagcgggggaagcagatgatgggaggctgcagtggggatcaaggacttgcacctgcgtcttgcccagaggccaggttgggactgggagggaagtgcagtgattcacggtcagtaaagtgtttgagcctcacaccgctgcagagcagcggttcttctgagatcagcagagaccactgggttggtgaaatacccaatggtatcttgggacttgggaaacctagaactggatcctagatccataacccaccagctgggtaagctgggacacactgccytgtccttgtccatagaagaagtgatgctggactgggtggatttgtgccacctttttctcaactgtagagcggagttagtaatgatctgacctcatgtgggggttaaaggaataaccgtgtagccggcgaagggcaccccgactagtcggggactctagcagggtgagttgttttctgtaaggtccctgcgtattaattttagtttatatttatactttcagaagtgttaagtgtaaaaaggacttcttttatccgtgaaatcactttttgaagatttcaaaatgtctgtataatacatagatttaaaataaaatttctaataactctataaaacctacgtgaacaaaataataaaatttatttagagcatatcaaagaagacacaaatgaatggaaatttgtaccatttctgaaatggaagaattcaatataatgaaaataccaagttaatctatccagttaacttcagtgccaatcaaagttacaatgcaagtggaaggaagggaagtattattctttgtaatttaaagacttcaggtttctttttttaactttggcaagcttttcacctgggagaataaacaaatgaaaaaagccaagagacatgtgaggagggtgaaaaacggatgtggacctagcagcttgcaggtcatctgcacattccactataggaagtattaactgtgcacgtgaatcaccttggtaatcagagggtattttctaaattaacatttcttattcagtgttttccagggtgcctgacgattcagattcgcactgtcctgtgtattttcatagtggtcttaatctactcagtagcccaaggttgtgtggtgagcatctccagcttgtggcatgcgcnggggcgggagagggcatggcatggaggaccagcccagaagccaggacccagggctgcagagacagggaggtcatcagagacgtcagtaacaggcatggggccccaaggagccagggaacaagagactttacttagcagaggaaaatgcaaattctccctggtraaaggagcctggcttcttcatacggtgcagaggacagaagcaggggtggaaaaacaggacagacagggcaggaggaacaggatggagctgggcagcagtaacaggatgaagctgggccaggaggaacaggatggagctggggcttggagtgaaaggatggaartgggtgggagtaacaggatggagtttgtagtgggagtaacaggatagaagtggggcaggagtaacaagatggagctggaggcaggagaaacaggaaggacagagctggggrcaggaggaacaggacggagctaggggcatgattaacaggacagagctgggggcaggaggaacaggacagagctgggtgcatgattaacaggacagagccgggggcaggaggaacaggatggagctggggcaggagtaacaggttggagctgggggcaggagtaacaggttggagccgctgggctggggagcaggcagggctgatcccacctggtcctccctggagcctcttgcctgctctggcagccagtggggagccttgaagtgctgtgagttgccatgaggtctgtggcttggtgtgatagcactgggggtgggtcagagcaaaaccttgggagacctgcttgaagagngacacctgagcatgcttaggggctgcaggtcttcacctgccctttgctaagcccctgtgacccctcccttcccaggtgggctgcctgccttgggcctggagctccaagcccaacagttccctggtggtcctttcgtctgggggccagcgcacagccctgcccaccctgccctgcgagtctacacaccatgccctgctctgctgcctggtgggcaccctcccgctagccatatttttccgggtgtcctccttgccaaaaatgatcctgctctccgggctcaccacgtcctacatcctcgttctggagctcagcggatacaccaggactgggtaagtgtgtggctcctcaagaaaaaggcctaagcagcggtgctactgaatctgtgtatacagatatgcactacaggcttctgagtccagaactagtcaagttgaattgtatacacaatttttagtttggtggctgcttctcttcaacccaagttctagcaaggactcagatttccctatgataagtgattcttggccaaggtcaatcccagcaagctgtttttgggtgtcaccacctgagggtcactctgaacagttcttgggtttggtggcagagtcttgccctggaagctcggcactgacttggcttttcttcctcatcttcccccaggggtggtgccgtctccgggcgcagctacgagccgattgtggccatcctgctcttctcctgtgcgctggccctgcatgccaggcaggtggacatcaggctgaggctggactacctctgggccgcacaggcaagacgagccctttctgctttctgggggtgggggatttagaggaggaagaagtcttcagcaagcatctgacgggggctgccacagacacccacacgccgtatggccctcggagggccctcctcagcagcatgcaagccaggcactgtccggggatggaggagacctatgctgggggtscagggagtgggagccatgcctcgtgagaggacagttcagaaggttgtgggntgcatgttgtggagacctgcctgatggtcagagcgtggctctttcacgaggcagtgagtcccccttcactgaacagcatgtgcagtggtggtgcagaggggctcagcctctgcagggctgggcagtggcagcaggtctcatcggggtcattgggaaatacaagaaaatgccaaaactctcaccacctactccaaattgagtaggtcagcaggtgggggctggacgtctatatttttacatgtaccctgggaaattctgacacaagaggcataagcaccactctttgggagactccatggagtagcaaacatgtgaactggcttcaggccccaaacatctgggtaccaggctggagaggagacatgctttcctgaagtctgtaggtggctttctgtttggatgtgatcctggcaatgactgccagatattcaccttgagttcctgctgcggagccacagcaggggtgtacctgtgtccaccccatggccaggggccaaggcagcgtgtgggtgctggtgtgagcatcttcacaccaactccatactccacagccctccgggaggtgaggcartcaaacatttaggaccaggctacctgggttcaaatcccatttgtggaatttgcaaactgtttcaccctgggaaaattgctcctcctaggtttcctcccctgaaaaccgggaatgaaggctgatgaatattagctttagcaagagatagtcttcttattttgacaccttaagaatagctcttcgctgttggagctatttgatctcattcagtcttcagaacagcactgcctaggagctgggattacagacaagaacacaggggccactaaagtaacatgccagagtcgggcagccagaaggtggctgagctgggatccagctgccatctgtgtgatctttgggtaggctctgaacctgtggagagagctgtgtctggggccaggcaggacaagagcattttcaccctagtcctactctgcagtcaggactgaaggcaggtgcagcccagagttggggcacagacaccagacaggcacagcccagagggtgcccaggaggaagcgtggccaggaccagctgagagctcactgtggaagcaggaccaggcttgctgctggagttgggaagcctgtcaattttttstctttgttcctgaggctgactgggcatcaagccatgcagttaagtgaccgaaaccctggtcagcagtagcaggggtaacaaaggttgggcctggcatcaggtggtcctcgtcctgaattccagcaactccatgtagggtctgcatgacttcaaccagtgataggtcaatctgtctttctgcttcagcagtaaaatggggtgagaaccctaatccaggtgtgcaagaaataactgaaattctattcctgatgtcgttggccacgggccttgtgcaaagtaggtgctcggtraggctgagcagccctttgtctggcagcctgttactctgtgatgagccatttttggggggatctctttctgggagggagggttagagtagggtgaagggtaggtgtgaggagcatctggaggcaagttatcactcatgaaaaaaatgaacacaattgtttcctctagttttattcatctggaaaagacagaagcagctcagtgggtttatgtcagcatgacagggcaggatgcatatttaaagtgatggaaattatgttgttgatttgagtaagcaaaagaaagaacatatacatacatcacacacacacactgtctatatgtgtatctatatacatgtgctcacaaatgcttggtgaaaaacatggcttattttttccttcactgtataatagctttattgagatatatttcacataacacaattcacttgtttagtgaacagtggttttcagtatactcacagtcctgtaacgattactataatcaatattagaatatttttatctccctcaagagaaacccatccccatcagttaacactccccatttctcctcaacccccaaaccctaggcaactaccagtctacccgctgtctgtagattttcccatttcatttatttttcagcctgtgtattaagttagtgcctgttctgggcagaagacattcctgtgtcctactagatggagctctgagctagccttgtaggtggggaagatccagattcctgagggactcatgatctggcgctgtcttcactgcatacctgaattccaggttctggagtgggcaggggttgctgagaaccctcgccctttggcctctcccggggaagtgctgctgtgtggtgcgctcactgtcagcagggctgtctgggcagaacaggccctaattcctgctggggagtgggaggggaccctggtgggggcataaatacatctgcattaagctgttcttgcactgctataaaggaatatcagagactgggttatttataaagaaaagaggtttaattggctcacagttctacaggctgtaccaacaggcaccagcatctgcttggcttctgggaagggctcagggagcttttactcatagcagaaggcaaaacatgaacatacatgtcacatggcragagcaggagcaagggggtggggggaaggtgccacacactttaaaacaactggatcttgcgagaactctgactatcgcgagaaaggatagcaccaagccatgaggtatccacctgcttgacccacacaccttccaccagaccccatctccaacactaggattacatttcagcatgagatttggcagggacagatacccaaaccatatcaacatctgagtctgacttatcaccagaggaatgcaggctgtggcaggaagtgagtcctcacgccagaaggcctgactgcggccacagtgggtttgagaggaagcaaagccaggcatactgtgtttctctgggccttgtgcgatgcttcagattcggttatggaaggatgagggatggggttgaggggaaagggacgaggaacatggcagaaagagggaattcttcagcaaaaactgtgagaggagtcagagtccaatcacaggggccagtgctccctccaggccccctgtgggcagtggagctgcaaagggagggcgataggacccgatccctgtctccaaaggtggtctgacaatggagtgtgacacacagcccaggaggcaggtgggagccctgtgatccacaggggccctgaggaaagcaagttgcatggtcaggggctggcaggagggcacctcggaagtggtcgtgtggagtctggccactgttggccatcaagtgagggtgcagtagtggaggtagagtgggtctccagggggctgtgcatgtatcacagcctgggctgagagcggarggcacactctaagggggtgagttcaggagcccttatgatgcttggactatttgaaagacaggggcaggcacagggcatctccaggctggtgtggcacttggggcagccacagtgggaatgggccctagaaccagggaacagagagggctgcctgataggattcaccaccttcagccgggagacgcagccagtccgcagcaaccatgcaaagaggaactgggaatgctctcctccctcgctactggcccctgctcccgctccccattggccaaacctggccggaagtaggaggcccaggaccctgttggtagagtccttggactggcctccctggkacagaaccggtggggaatggactgcagatacagcacatacctgccctggaagggagatctggccagatacagcacatacctgccctggaagggagawctggccagctgcagtttgctaaagccacaccaggtaataggaaaagagcctctttatgatgggctgtgttgctgaacttggtcttagtttggctctggctggctatccagggtgatccagctggctggtctgggaggatatgttgacccagccatcagctggcctctctgggttcagatctttttgttgcaaaaacctactcagagcttgagaagaatggacttgggatgagctagaaaaactggaacagcccaggcccatgagatctggggtttccaggttatttactagggtgcctggttggttcctcattctcagacagcagatttgggccttggctatgactcttccagttgagggacacttctgggagagacatttcctctcatctgggttgacatggctttttcttggctttggtgttctttgaaatgttattaaatgcagtatttgaccctgccatgtcgttctccatccagtgacaccccctagcaatgcccaatgagcataccagtaattttagggctagaatatgcattcctgggccttggggcagcccgggcaagtctgcggatccttgtgcatgcgtgtcacaagaaagggttgcccacatggagtatactgccatgtttgtccacagataggtaacaacaaatgccacctgctttcccgtaaccctagcaaaacacagaactttgtagactttgcctgtttgcccttggacatttaggtatgtagtacaaacattagagtgcctcaaactattgcaaaattgccaggccaaacactaggtaggttaattatttacagagactggattgattgtccaaacctgcacaaacagataggcttttcccttgggaggcatcttcagcctcttcgcctgtaaactcttgtatgcttttgttccagtgtcatttctttctttgcattcagtagataatcatcatggcaattataatttcaatgtttatgctatttagtatagaatgaagttaaaacaacttatttctctaccaataaacgcttaattcgatggtaattcccattttgcagttgccattattaacatttagagggaaggtttcctaagatgtggtcatggcatagacatggaatttctggtggcagaagctaagttagagacctggttccacctcttactctggtcacttgtcttctccacacatgtgacagtgacacttgtctctcagggggttgtggaggagtttatgtcatataaagccgtggtcatcatgcttcttggaccctgaaatgttgtacgcttgttagtcgtcatcttgtyctctgttactggccataggtttcacatctggcctttgggtgagtacatcctcacaaacagcttttatggagggacagatggttccagatgtatcctagctgcatcctgcagcacacttctatggaaacctccgaggagccaaaccttggtgcgtaacctcaggaccccacatccatcaggccccatgcccactggaaatacaccctttgcccatctgagagtgcacacacagcctctggcaggcatccactctgtacctacacacaaagtgttaccacctgcctccatccaacaggtgcttattgggcaccaaagtatacctaatcctgtgctggggacgctcacatggttgaggtgtaacccctgcccttgggtgctcacaggctgttaaaggaatcaaacacaagccacagaaaatttcagtacagtgaagggcgtgccatgtaaaatgtagacaggaccctgacccaggtargttggatgtgatatcatttaaatgtaatacctcacccctgaggcttaaaggatgagtaggaattagccaaggaaagggcagagtgctaggtggggtaagtatgtctgtctygtgagatgcttgtttttattgttattttaaaaaatcagttcataatactgtattgtgtacttgaaatttggtaagatagcagattttaagtgtcctcaccgcccccatcccagacacacacaaatggtaactgcagatggtgatagatttgttaagtaatttgatcgtagtagttatgcaatgtatacatataggaaaccatcacattgcacatcttagatatatacagtttttgtttgtcaattaaatatttcaaaataaaaaaaaatactaagctcacaaagacttaccaaatctggatctcaagagcaagaaattaaatgttggtcaaaggaaaaaaagggtctttcagtaatgttagcgggtaataaaggggtcagtttatcaagaggacatagtcctaaacatttatgtacctaaaacagatcatcaaaatacataaagtaaaaattgatagaactgcaagaaattcttctatctataattatagttggagtttccaayattcctttcgaaaagcgatagaatcgctggacagaaaatcagtgacagattataacacttaagaacactgtcttgcatcccagggatgaagcccacttgatcatggtggataagctttttgatgtgctgctggattcggtttgccagtattttattgaggatttttgcatcaatgttcatcaaggatattggtctaaaattctcttttttggttgtgtctctgcccggctttggtatcagaatgatgctggcctcataaaatgagttagggaggattccctctttttctattgattggaatagtttcagaaggaatggtaccagctcctccttgtacctctggtagaattcggctgtgaatccatctggtcctggactctttttggttggtaaactattgattattgccacaatttcagagcctgttattggtctattcagagattcracttcttcctggtttagtcttgggagagtgtatgtgtcaaggaatgtatccatttcttctagattttctagtttatttgtgtagaggtgtttgtagtattctctgatggtagtttaacatgcacacgtatgtttattgcggcactattcacaatagcaaagacttggaaccaacccaaatgtccaacaatgatagactggattaagaaaatgtggcacatatacaccatggaatactatgcagccataaaaaatgatgagttcatatcctttgtagggacatggatgaaaytggaaaccatcattctcagtaaactatcgcaagaacaaaaaaccaaacaccgcatattctcactcataggtgggaattgaacaatgagatcacatggacacaggaaggggaatatcacactctggggactgtggtggggtcgggggaggggggagggatagcattgggagatatacctaatgctagatgacacattagtgggtgcagcgcaccagcatggcacatgtgtacatatgtaactaacctgcacaatgtgcacatgtaccctaaaacttagagtataataaaaaaaaaaaaaaaaaacactgtcaaccaacttgacttaattgacatttataaaacacactatccaacagcaacagaatacgcattctattcaagagcacataagtatgaacagtacagcaagtctcaagaaattcaaaaggattcaaatcatacaaagtatgttccttaactacaatataattaaattagaagtccataacagaaagatctctgagaaatcctcagctaaagaatatacttcttagtaacttttggttcaaagaaatcaaacaggaaattagaaagtaatatgaaccaaatgaaactacatatgagatcaacatttgtggggttcagctaaagcagtacttggaggaaaatgtataatacaaagcacctgtattagaaaagaagaaaggtctctctcaaatcaccttaagaagccagaaaagaggaaattaaaccaaaagtaatcagaagaaattaaataatagagaccagtttctataaatgtttaaggaataaaataacaaggaagtattataatcaattttatctcaataaaattgacaacttacagggaaggatacagatcctttgggtcttgcttttcacctttgttaggaagaaccagaggagcattaattctcagactaattttgtccgctcctgaggcaaaacccttttcagtactttacctgatgcctggtgaattataaggttttttattcttgccagtggaggcaggaacaattctcagcattgcatgaactttgggggttgttccctacagtcmtttgcctaacctgtgctaatccctagatggttctttctctagcctttgctaatcagtactcaactagagacttgaagagaccagaacactgtgtcctctctggtattttccctttgaactcaagctgccttgggcttccaagcccyctagccttgtcaaatctgggagacccctaggctccacaggcactgtctctacatgcggcytggaaactctcccagcagtatgctgggccattgcaggcctcatcacttattcccatcactcaaggatcactgtctttcattgcctcctgtccagtatttggaaagctgctgttttatatattttgtgtggtctgcttgttgcttgtaggagggcaaattgaattcctgttactccatcttttccagaagtggaacttcatgtggccatttaagtgtctttgaccccaaaactggtcattatccccatgtaacaggtgagggccaaagtaaatggccaaaggtcagaactgaaatctgccaaaccctaaatgggcactctcatggatgccatgcatgacatgtctcagaatccttctcctgccaagttaagtaccatccagagtggaatggcattctggtgagaactgtctctaggcagaatcctgtgaacacagccaagaattagaagtcctcagctctgaggcctgtgcttctccctccacagcagtcaagatttcatatgcatgtgtggctggagggtttctctgaaaggttagatctgggttagaaggacgcagcataacttcaacatagagcaaaagctccaaagaccccagaagttgctttctgcccacagtgtggactgttcgtggagagcagtgtggtagcagtgtggcagtcactgtgcaacaagaaagaagatgtctgtggtgtgtctcaatgccatgttgggcttgagcacgtgaagttcacctgcaggccctaacttgagcacagcacagttttgctaatctatgaccagcctgcagaactcagtactgctaatgcaggcacctctgtgttcttctcaagagtgtggaaaatagcacctcaattcctccctggttcgaaaagatagagaaacgttggtaactccagactttctgatgaggaaatggagccttctgctttaaggcaccagaggccgtctgaaacagcagacccaccggacatcccctaggacayctttctgtcatggagtgtggctgctttgcatttttttctgtgtgtgtgcaatgaaaaatccagattttcggccgggcgccgtggctcacgcctgtaatcccagcactttgggaggccgaggcgggcggatcatgaggtcaggagatcaagaccatcctggctagcattgtgaaatcccgtctctactaaaaaatacaaaaaattagcctggcatggtggcaggcacctgtggtcccagctcctcgggaagctgaggcaggagaatggcgtgaacctgggaggcggagcttgcagtgagctgagatcaccccactgcactccagcctgggcgacagagctatactccatctcaaaaaaaaaaaaaaaaaaaaaggaaaagaaaaatccagattttctgcaacagtctgttacatttataatcacaaagaccatgtttagcacagttagtgtccatgtggagtgactggggccactcttgcctggctagttgttgtggaaacaagggagcttgtgctggcaacacgtgctcagggtcaggctctcagccctccccaggaccgttcagcttcagagtgctcccccgtaggatggcctccctcacattctgagtgggtaaattcacagtggcctccccagctctgaggcctatgcttctccctagactctcctgcatcttgcaagtagagtaaaaggtccaaagaccccagaagttgctttctgcccacggagtgggcagaaatgtgcacaggctgctgctgctaatcaagggaggagaggagaggagactcgaggagtgtggaagacagaatgccatgaaggccctgggcaggtgttgtttgctcctcagaaaggagtaatttattctaattaaggggctgaagaggacttcctggaggaggtggtattggaccaggcctttcactgtggcaagaaatgctgacttttctgaaaagggtaattttggtaattccctgatttcaatgtctgacattttaccctggaaacttcagtcactgaaactgagcttgatcaatttccagcagatcctacccccacattttatattggtataagtggatattcaaagctaggaaagaggactctcacagggccttcacttcattagacagggtgtcttctgcttatggagtctggatgctgtcttcccagcctcggtttctctccgtgtacagtgacggtggacctcgtgaatcactgagagcagatctcccaggggcaggaccagctgtgcccactgcagcctcatagcttcactgttagcacgagctctctttaccttttttttttttttttttttttgaggtggaattttgctcttgttgcccaggttggagtgcaatggcacgatcttggctcaccacaacctctccctcccgggttcaagtgattctcctgcctcagcctcctgagtagctggggttacaggcatgcgccaccacgcccggctaattttgtatttttagtagagatggggtttctccatgttggtcaggctggtcttgaattcctgaccttagatgatctgcccgcctcagcttcctaaagtgctgggattacaggcgtaagccactgcgcccagccctctttaccttttaaaatggcatccccatcttgcttcctgtctgaaacactggacacagccctgcctccaactactatgttgactcatcctaagaaatgaagaactaccaagcatttcagcacagcaaaactttcagctcagaagctccttaggagtaaagacttcattgtcagaaacagagccagccwctgcattcaccaccgccggtcccagcatttctgtgggggttggatgttggatagtcctggtttatttgagctgatttgccctccagctcatgaactccaattcccccagctatgacatcaccacagcctcatttataccacagggccatggatgggacaaacacatcatgagggctgtggtctgcctttttatttcttggaaagagaaatacaacaagatgctaagtattttatagaaaaccacacatgcatgtgtgcatgcacacacaaacacacatactctcttacacacacacacacacacacacacatacaccacttatggacttcctagggcagtgtggaacatgtacatgtgcatgcctgcatccacacattgtaactgcagcatttgaaggcttattctctcattttctaataaaggtcagggataacatttttaattcattgaattgttcaaatttaaaattaagatttctctttaatgtagtagaataatgtaaatcacatttctcctcatgaagccttaaccgaaatgcatttttgatctaaaaagggcttttcatctgttctatgctaaaagggaagtggagctgattggagtagcaggcagcaggggcctgcatgagagagaggcctgggtttaggggatggccacctgttgcattggcaggacttgatgggtctgaagtgctgagttgggtgcccggtgaacaaagatgctgagccgggggccctggtgttcagattaagaacacctgcaccacactcagcctgccccatgctgtaaacagtgcttgtaaagtcttgtgctttggctggaaaagtaattagtgagaagcaggcatgtgttcatgttatgtggtccctgaagtggccgtgcaaagctagagtccccagtggggagctgcgacctctccccatgcctcaccctcctatcaagctggtcattttcatgcatgaccatggtcctatggtttgagaagaacacagagtaggagctggcaccagagtgacccctggtaggctcaggttctgtgctcactgcagccgctgaattgatagaaaaaaactggacaaaataaaactgaactgtcattctgtgtttaaaatacagtcttttgagcatacagccagctgagtaccaactcatggtgtgaggcctggggaggtggctgggagccctgcatttggctaaagccctgcctccagccagtgccctgcctgggagaagccttagccagcttgctgggctcagcctggacatccaggcagagagggaccttcaaaccagtcaccagtaagaggagtgaccaaaggaactgaaagtaggatgtagggtgagggcatttcagtccttccatcctggtacagctggcctctggagcacactgagggcagaaccaaggcctctggacaaaagatccagggagggagattttcattcaacgtatgttgtccagcggctkgagggtttgaggttgggtgaagctgacatgtatagtagtgagtcccccatctctgtgaggtgttcaaggaaacgcagataactgctcaaggagattaggtagactggattcattaattactttaggggtaagattacctctaaaaatgcttcttggaatactgatatttgagggacatatcaaagcagcctcccgagcagccagggtgagagctgcggacaaggtggagaacgtgtggtggttgtgcacctctgctgggggacgggagggtgggaggctggtagttggtaggggcacatcagggacctaactacatgggagggaaggagagtggaaagtgggaaatactccagagttcagccctgtagagttgctgcctactcctggtactctgaggtcgggctaggttgcscagcagtcgcaggcctyctgagggtgccagtagtgttcctcagataggacgagttctcttctcactacatgtctgatgcagtacagcaagaggatcatgtcatccttgtcctccaagatccaggccagtggacaccggagcttcctcagtcctgcagcacagaaggggggctgtgaagtccaggctggccactgagggtccagccagaagccccccttggtctctctggttatcaagggctgggactgcacaatcctctttgtccctgaaagtcagtggtgagcattagggacttctaccccagagccctgcagggaggagagaagccactggcatccattccggggagactcactgggtcagggcatgtggctttgcccctctggtgtttctgccctcttgacaacagttatggggctactctggacatgtgcaccctgcccagcctgcccagccagggtcaccctgaatctcaggattcatccgtccttggagcagcaacaccatgcagagacgtgcatcacttcttacttgcttgctctgatctttcttcgtcccgtcggtggcatgggtcacagagtgcctcttgcttaagggaaaaccaagtgtcaaagaagctgaacatgaagcaattcagccccaaagttagagactaagttcctctaaccttggggctgaagactattgtcttagctgctgctgtgcttggagaagttcctttccctctgcactttcccaaaaggaggtgtttgtggaccctgggatgcccgcaaagaggggtgtgtgcacctcaggacactggatggttcagtgaggtttggggagagggcatcacaaagtctatttatagtgattgtatctgagaattaagaaatgttttttcctgatgttgaagaatgaactggcagtgctgacctgacactggccagatgccctgtgtcacttgcaggagggaggyggggacatcacttctgagacagaatgaggacaggaccaccctcccttggctgttcccttgtagtaaacacgttgttgattccaggttctgtggttactggtcttgttatttaraagactctgtcagggtgactgtgggggtcactcatagcacatgtcggcacacagggagttgccaagttatgctgtttgttattttgttctcttttccaaatgacaagccctccaggctctgacctctctgaggcatcacgtaactatcactagatgcatcctggtcagtgatttctgaaacagaaggacaattgagaagggaaataccttttgaaagaaactgtgccataaagagaacattctgaacatggaggttggatggacacgtgattttgttgacaggaataatgtgtggtgcccactaattctttcttaagaatagagtttcctggtgggaaaatcttatagactgagaatttcagtggattttcatcacatttgttaaaatatataacaatacaacttctgcttggttcgtgaaaataagtggcacagggaaagacagacgtttctcagtcaaatstcaacaaagacctttgcatttgtggatggattaagagatatatgatgatttgggaaggacagcagctctgatagcccattaatccaaatgtggaaataagcagaatgtagacacaaatttttaaatcacaatgccataaacctagattatggtttttaatcaaagcatattcaattacgttgttttcactaaaatactattaacattaacaatggtattttggagagagcagtaatttttgtgccactaataaataaaacaaagctattattttagaaaatattcttcactttctgtttatgtcaccctttacaaacctttcttttgtgtatattggagcctgatgtgttaacacataattaataatgtgggtcctatagagaggtgtttgtccagaatgycattattgatgagaacttgagttgaaagcagccccggagaccatctgaggctggaaattgaaggtttctgacctttgagcatgacccagagtaagtcagcactgtgcccagacagccgctgcgtgggcagagtgtggctccagcccatctgggcagccagaccccagctctggtctgaccgagaaggttatggtccctgggtttcttttgtcctcatctgcttctggtctacgctccttaagggacaggaagaaacacctggcgccgtctatctccatggatcgcactgattcgctggcattgtcttcccagaacacacttgcaccaggcctgccctgcatgccctgcctggcttcacacacacccccatcctcgtacctggccctcaaggctcggggcctcrtcatctctatccttagaaatctccacttctctgttttaactggtggaatcactgtgtgcagtctagyggcatattcgtggccagctcagctctgataatatcagtactgccagaaagcagctgtgctctttaggcttaactaaggggcrtgctgtcccctcagcccttgttaagtacaaccctacaagtgttccctctaacagtgggtgtgttacacccattttacaataaggaaaccacggcacagtgaggctgcatctgctggccgggtcaccagccacctagggggacctgaaccaggggagctggcttccaaaccatggcttgtggtggccaggccatgggccgctccgcaagggcaatcattgcacagtttttactacattcaagagtttgatgcctccataaatgctgacacatacttagagtattccccaagcttcactcctttcaggagttgggttctgtgtgaggaaacacagggaccctggtggcttctgcctcctagggctgtgctgggtcctgccaagagcacttcttgagccctcacagtggtctgtgaatgaggcctttgctgtcagcttaatcagtctctgcagggtcctacagctagcagtaagcaggctgggactcacctgctcctgccatctgctctgccgtgtcctctccccatggtgggaccctttgggtctttactctttgccccagggggctggaagtcggcactcagatgagctcattggccctggatctgcccctgccctaggtccctgcagggttctacttgcctcaatgcccagagggatgtggctctagtgaagaccagagagattccagaggaaacaggagccttaggaaggtgtctgccccacctgggtgtgaggcattctaggacaggtgccctgcggggcacatcaggagctkcctgggggctggtggagcctgtggatgggcacatgcctgagaaagagttgctgtagcatctggtccctaaggggtggcggagggcagggcggaccctggaaatgaggtgaagccatagtttgtcctttggacattctagcagatgaggtggtgacttaggcagacatctgcagatcttccctacccagtaacatggatctagtcttgcatctagtggggaggagggacaggagcgtggatgtagaccatcagcacacctggagtccagtttggatgattagaaggaagtgtgcggtgggaacaagtgaaggcagcgtgagtggatgggactaatggaggctcatgataccccaggcagaggaggagygagaggacatggagaaggtgaagctggacaacaggcgcatcctcttcaacctcctgccggcccacgtcgcccagcacttcctcatgtccaaccctcggaacatggtgagcacccagcctgctcctggccagcactagccckacactgctctggccaccccacttggcgctcacctggctgacccttcctgacccatcctttgaacttccaggacctctactaccagtcctactcccaggtgggcgtcatgtttgcctccatccccaacttcaatgacttctacatcgagctggacggcaacaacatgggggtggagtgtctgcggcttctcaaygagatcatcgccgactttgacgaggtgaggctgtgcgtcgccatcctgaccccgcctggttgtggtggtgcatcctgttgcrtgggcagagcgtgtctcacaatatgtcacattcttcgtagctggaatgagagaaagcaaatcccgggaagcacaggcattctgtctcctttgggatccagaccaaccatgacaggagagaagggggtcttgactctaggttgggggaccagggccactgggtggggctgggtgtttgttgtccatgttgtaaatgtcagggctgggacatctacagtggccagggctgggcagcctcatctacagatgggcaggcaggtgggtgcctccaggcccttgtctacagatggacaggcaggcgggcacccttgtctacagatgggcaggcaggtgggcacctccaggcccttgtctacagatgggcaggcaggcacgcacccttgtctacagatgggcagacaggtgggtgcctccaggccccccccaccccgacagccagccaggcactgtggcagccccaccacsccttgtcattggacctgattctcctggtggctgcgagctcacctgttggggacaggaatgtgtcctgtactgtcctgcctcacctcttcttgccartgtagtcctagaacttgtctgcccaaagcaaagaagacatgttgctttcctgaatgtgtccatcggctctgctgttgctcctgggggctgayggctgcagygacttttctcaaatgttatgtcatgtttaacagttttatgttttaaacaaagctcatggaaaaagacttttacaaggacatagagaagatcaagaccatcgggagcacctacatggccgctgtggggctagcgcccacctcggggaccaaggtgagtgcagcctggcgctgcctgcttggggactgggtccaagctctgccctaaactgctctgggaccctgggtagcttccacactggggtttgtttgccctctgtgttggattacaggagcagcttgagtgctgtttttgtccgtggctggctctctccagacacaatctcctagggaaagtcagcacagaaggcaccggagcttcctccagccccagccctgccctgctagacacctccccctagaaccctcaccctgcccctgctccattacctcccgcactggcccacctcctcagcagcccagtccctcccccaccagcccccaccttcctccctgcttgcccctctcttctcctcccatcagccttgcactctccttttccacagtagaactatgaataaatacaaataattattctgaataggtctagatttattaaagaarttgaatcaataattaataatcttctgaaagagaaagcaccagattgagatacatacactggtgaattctaccaaatatttaaggaagaaattacaccagttctctacaatctcttccagaagacagaagcagaaggaacactttctaactcattctgtaggccagcattacctgaataccagacccagacaaagacgtaatagaaaaagaaaattacagaccaatatttctcattaatatagatgtataaacccccaacaaatattagcacattgaattcaataatgaatggaaagaattatatactaaaactgcattggattttttccagatatacaaggctgttttagtattccaaaattaattcatgaaatttcatcaaatcaacaggataaagaagaaaaattatataatcrtatcaattgatgcagaaaaattatttaagtctaacacccattcctggttttttaaaaaaactctcagtgaactggcaatagaagacaacacctcagtttgatttaaaaaattttgcaaaatacccatagcttgatatacctaatggagggaaactaaatgctctctaagatgagaagcatggcgagaatatcctctctcaccatttctattcaacattttactggaaggcagtaagacaagaaagaaaacagaaggcatacagactgagaaggaatctgcttgcagatgacatgactatacgtagaaaatgcagaagaattaacaacagcaataacagaaaaaagcccctggaactaagaagcaattatagtaaggttccaggatataaattgaatatataaaagctcatcatttttctgtatgccagcaatgaacaattggaatttgcaattacaaacaaaatgccatttatagtagtagccaaaaaatgaaatactaggtataactctaacaaactatgtacaagatctatatgagcaaaactataaaattctgatggaagaaatgaaagatctaagtaattggggagtcagtgttcctgcatcggaggagtcagtattgttaagatggcagttcttcccaatttgatttatagatttaacacaagtccaatcggaactccaccaccatattctgtgtcgttgacaaaatgatcctaagtttttatggaaagtaaaaagacacagaatagtcaacacaatattgaagcagaaggacaaagctggaggactgacactacccaacttcaagacttacaaagctgtagtaatcaagacagcgtggtattggcaaaagaataggcaaatagatcagtgcaacagactagggagcccagaaatagacccatagacatatagtcaactggtttttggcaaaggagcagtagcaataccatggagaaaggatagtctcttcaacaaacagtgctgaaacaactggacatcacatgcaaaaaaaaaaaaaaaaaaaaragaatatagatgcagactttacacccctcacaaaaattaactcaaaattgataataagcctaaatgtaaaatgcaaaactacaaaacttttagaagataacatagaagaaaaatctagatgaccttcagtttggcaatgactttttaaatacaataccaaaagcatgattcatgaaagaaaaaattggtaagttggacttcatgaaaattaaaaactcctactctgtgaaaaatattgtttagagaatgaaaagtcaagtcacagattagtagaaaatctttgcaagccacctatctgataaaggacttgtatctatagtacacaaagagccattacaattcaacaagggagaaaaaaaaaccccagttaaaaagtgggcaaacaattcgaacaggcacctcaccaaaagagatgcagatgacagataggcatatgaaaggatgctcagcattgtatgtttttagggctttgcaaatgaaaacaacaataaaatatcactagatacctgttagaagggctgcaatccaaaacactgacaagacaaatgccggtgaggatgtggarcaacagaaactctccttcattgctggtgggaatgcaatctaggacacccactgtgggagagagtttggtggtttctcacaaagttagacataatgttaccatatgatccagcaattgcacttttggtatatatccaaatgaaatgagaacttatgtccatgagtattcatagcagctttattcataataaaaactggaagcaaactaggtatccttcagtaggtgaatggataaagaaatttggtatatccataaggtagaatattattaagtgagaagaaatgagctattaagttatgaaaagacatggagaagccttaaatacaattggctacataaaccagtctgaaaaggttacatactgtatgattccagctgtatgaaattctggaaaaggcaaaacggtagagactgtaaaaggattagtggttgctgggggttgggggaaaggtggaatgaacagacagcagggaggattttcagggcagtgaaactgttgtatgtaatactgtcatagtggataaatgtcatgcatttagaatgcatagaatggacaataccaagagtgaaccctaattaaattatgtactttggttaataatatcaatattggttcatcagttgtaacaaatgtgtcacacttaggtaagatgttaacaataggcgaaactgtggggagaagggatatatgacaattctgtataatctgctcaacttacctataaacctaaaattgccctaaaaataaagtctgttaatttttaaaaagcattagtttcctgattgtgagaactaataaaattccctttaaaaataaaaattagagactttacaactgttactgtttcacaagagaaaggaccttgtcacacacatacatgacgatgtagcctcaatctcaaggagggaaattgcctactccctggcatgcatctctgtccttgttttgctcatttgcaatggccattagcaacgctgtccaagcaggagtttgagcacctggtctcccactcaaaagggctgccctgccctattcctgcaggcagccttgggtgggccctgtctctgcccctcaggagcccctggggcttggccaataccctgcctctctcttagtctcctacctgtagaatggaatgataaatgtgcctatagccaggcactcagagtgccttcctctgaaagtgcagctgttgggcactgcaggttggtccctggccccctcttgccttgcactccccagatgtaatgaccccntctgtttacacctagrctaagaagtccatctcctcccacctgagcacgctggcggactttgccattgagatgtttgacgttctggatgaaatcaactaccagtcttacaacgactttgtcctccgagttggtatgtggctctaaacctatcctgtccatccatgtggaacaccttcctacacccacctaggggtgggatcagctgatgaggtaccctggtcttacaggaaggagggtggtgccacccaggagggcatggggacctgtgtaccgagttgcccctggaagctgctggtggaaggtgaagatgcttcagaaagtgacttagactttgaagattcattgtctagctcaggaaacacattagaaatcttgattgtcctggagacgttcagatgctcctccaagtccacacttagctgaagtaaaatgcccttttccctgttcgccagccacggctacatagttgaggccacatgggctgtccagaaggaggccttgacgggagccccactgtgcggactccagccgccctgtgtcttctccaggctccttccctcacctgtgtcgtgaggaggaaaaaccaytggatgccccagttcctttctagcttttataaaactatgatttgttgtttttttttttaatcataaattcactttttcttgagatgtagacagtttaccagaaataaattctactagtccaggatacagttaaactagaggttcatggttgttttcgaattcaaacatccagtagccttaaaaacaaaacttggagctgcttgtgagtgtgaagggtggtaggtgatccatttagagcatgtggagttctgatgtcctgaaaagcaagctcggctttaggcatggtgtctgggcagagggcaggggcagagtgagccagctgggccctgggctctggtyggcagagctactgatgtgcctgaaaatcaatctgatggtgggtcggggaaattctgctcctcactttccaatgacaagaccagctggcaagcccagccctgtgtctcagtgtctggtcatgcagtggggctggacaaggatctctcggggcccttctgcccatcaggccggtgctagcctagtgttctttatgtgggtggggagtctggggttagcagagggtgctccctaactcccaccagctccagccatctgggaagtggtcctttggggttcttctctgagtttaccatgcccaccttccccagctcacaccactgtgccgcctgctctcaggctcctcctatgccatgccagctccccactgcccaggatgtcagaggaattttctaggacaagctcagaaaaattagtccacaagtatggaaggggaagataggaagtggcttcggtcgaggccagaaagccccagttgcaggaggtggctgccagcaggctgtaacaggagagctgacagcatgcttggtccccctctgtcctgccgaggaygggccaggcgtcacagcctggtatgtgccctacttacagggaaggaagtccaggctcagagagggtgagtgctttgcagaaagttgcacaaggggtgactcaagttcgggtgtgcctgggttgtcacgatgctgtccagctggtctgcagctgtccggaggccagttggacactgagctacaaaaagagaagatactccctctcctcccttcagagcattctgcaccatcttgcttagttmtggggcccatactctaaaatagccataaggtcacattstgagaaaaggtccggagctgctatttttctggaagagaggatgcacttggagacataccctgtaatcacagatattgaaaggccacacttctgagtggctcccctggtagggctcagcacagaggctgctattccaggaaaggggacttttatttaggatcaggactcgttttgaacagccagtgctgttccccagtgcagtggacagtgtcgtgaggagaccctgcccaggggagcccgtgcagcagggcagctgcctctctggtgctgtgtgtgatgcttcaggaaggagcctggtgctaggtgaccccaggaaacaaagccctgaaaggagcagccttttctccaccaggagcagcatcaggtgcatttggtggccctggtggggtgagttacacttttcccgctgatgacaggtcatgcgctggctgttttctaggcatcaatgttggccctgtggtggctggagtgattggcgctcgcaggccccagtacgacatctggggaaacacagtcaacgtggccagtcggatggatagcacaggggtccagggcagaatccaggtcagttcaccaagaaacccctaaggcatgggtgcccattcttcakgtgaggaaactgaggcacagggggccagaattgaatccccagtctacagcccgtaagtggcagggcagaaagagctgcatatttcggtctgtctgctctggagggcatcctggcccgggcatcttgattttgctgtttggtttgtcatttagccttgggggctggctcctgagtgaccaagtgcagtggtgggagcactgagtcactgggtcctgctgctggtcccagcagcctggtggctctcattcactctgcacatcccaggactccrgactccaccagctgccataggaaggaagggctttcttgtgtgtttgaagggagggtgctgtgcatgtccacctcatctgaggaacttgtgggcagctgaggtggcctgacacatggtggctgacaccctctaaaagccatggaaaggtttagaaggcagcagcctctgcttttcctcagtgtggaggaatgtggttcggcttctgggatttcccttggaacaaatttgaaacttgactcggtcttgatgaccaccaggatgaagcccttaaaactaagatggagattgtgaggggccacacagccctgcagccaccctcgctgggaactgcaggcctccagaggccatggagggaaggcttggtccccaggcacgtgacagcagctattcacgggggcagtttaagggacaggtaggccaaaatattcatggagctctcctctcctgctcaaaacatagatggggcttccatggagcagtgctgcacttctgcattctcttttttaaaatttcttttatcacagtaaggtatacattgaatttgtcatcttttttctaggtgtacggttgagtggcattaaatatatttacatggttgtgcagccatcaccaccatccacctccagaacttcgtgctgtatatatatatatatacacrtatgtatacacatatacacatatatacacacacatatatgtatatatacatatatgtgtgtatatacatatatrtgtgtatatatacgtgtgtgtatatacatatatgtgtatatatacagcatgaagtgtaaatatatatacttatacttttttacaatgtactttttaaaatatacaatatttaaatattaatattaattttattaatatatattaaatatataaatatatttatatattatattaaatatgtaaatatatattatatattatattaaatatataaatacatattatattaaatatataaatacatatattaaatatatattttatatattatattaaatatatattttatatattatattaaatatatattttatatattatattaaatatatattttatataatatattaaatatatattttatatattatattaaatatataatatattttataattttataattttataaatttttatatttaaaatttttattttaaattattttaaattttaaatattttataattttatttaaataataaaattaaatgttaaatatattaaattaatattaaatatataaacatatatatatacttacaccttttttttttttacagtgtacttttttttacaatgactgtatcctgcacccttctgcaggattcccccaaaactggacttgccaggggagaacttcatgggagccccatcctgcccaccccagcctggcccctgccccaaaccaacactgcatttttaagtttctaaaatcagatctgggcctgccactgtcctattttgcccctgcctaacacacagactgttcactggtggcctctgtccaatccccagccaggtgtctcctggctgcccaggatatcacccttgcactcacagggcctctgtcctccctcccctgcttgggcttcctaccacccctgccacactgacgggggccagcctccccaactctgggtattagaaggtgggattggcatggatttggttcttttaacaaacgatgccagggtttgaatggactgtgtgtgtgggagagtgaggagcagccagggagatagggaggaagagaggaagttccaagatcacacctccaacataacgcagagataccagtcatgtcytctgttcacaggactcattgcatttagtagaaactattttctcatcctttatctttttcctaactttgtgaagcagaaattctttgagctagaatactggttgcgaacctgtcaagaartgtctctgttttctctggacagtttgcctgctgccctccgtatgctggtccctccctcccctgactcagggttgcagaggcagctatgccggggtcctgtgaactggctggtttgcacccccaccgacaccatgctgctgcccccagcagtgagttggaagtcaggctttgccctagactctactctttgctgccccttccagctgaggggggtaccttctgccccctacattctgtatgccctacttgtaaatgtccctggctgttgaggtgccaagagtcctgaacccagagagtctaccctactcttctctgttctagcatctggagctgggtcccacacagcctctggcatggagtgcatggagccaccatggaagctcacatccagaccctggtgctaggtccctrcaagcaagccctgccccactgcctgcctgtctgggtgcttcctgggccaccctttctggctcagtgaacattgcctcctcctattgtccagggaacaggcagtgagactcccctggggctggccccttagactcctccgagtccgctgggttgtctttgcagggctgtgtcttttttaacatagtgacccaagtgatttcagcaagagtaggggccctggctgccaggctgagctgggaaagccacatcccagtgccagggttgggcagtcagggtggacagcaacagatgcaggatggagtgttttggtctcttcccrgaggagtccccctcattgccctgaagtaacactcacttctctccatcaacaggtgactgaggaagtccaccggctgctgagaagrtgcccctaccactttgtgtgccgaggcaaagtcagtgtcaagggcaaaggcgagatgttgacatactttctagaaggcaggactgatggaaacggctcccaaatcaggtccctgggcttggatcggaaaatgtgtccatttgggagagctggccttcagggcagacgtccccccgtgtgccccatgcctggcgtctcagtcagggctgggctccctccacactccccaggccagtacctgccctctgcagcagctgggaaggaggcttagtggagcccacgtggssctctggggtgcacatggggtgggaatgctccgggggtgacacaggccacggtggctccagccaggaccagccagaccagcagagcagggagccacttgccagggtggaggaggagcattgtccaggcatggcctgtggcccgagggccaaccaccgagcaggcacagcacagcagtgactcggtgaggggaggacacccgactgtgcacacttccaggcctccctggagaggtgtccactccatccttccctccgtggcgtagggagcactgtttctttccagcaagcctgttcaggtttggccaggtcggcatcaatgtaaggaccttcagagcatcccagggttacagcaagagccactgaggtgtggctggcagagcaactgaggagctctgcgagagtgtgccctctgagacagccctgtccgccccgcccaggtgggacctgacatacaggcggctccagccctgggcagcggcttcaagagccagagtgggaagtcaggcctctctgggaaggtcacaaggcctggggttgttcacaccacaggcacaatacagagctgtccactcttgaactggacggtctggggagaattgagaagctgcctctcactgcatggatagtggtggctgctggctttcaagcgtggttttttgctaagagccagaggcaggtcttctggagttctcaggggggccctgtgaccccctctccacaaccatggccagcatcggcttcttgctgcacctgtgcattctccacccctccgccaatggcttccagctcctaaaacacctggacattccccatcctgcaccggcactgtgtttgttcagagaaaacgaagggtgtcatttcttcttttccctgtggcatcgtggatcctttacatttagcaacaacagtgtgaggctccacttctgttgaatatgagcggctgtcacacccatgagcaagtttccttgatggaagatgctgtttctccggcagaaccaaccctccaggacgaagtttcagaattggctgatggtcgtgagtgcaggtgtccctgttgtaatttgcagggaaattgactgcaggtgatagtgttgacgtctgacgtctgacaacctcctatgtgcatgtctaaatagtcacaatgaagatgaaaataaggatgatggggacggggtccaggagggccactgggaaggcactatccagaaatagtggacagaggtctggcatgtggaaaccttggatctcggtcacagggaggaaggcagctagaaatgggagggaagcttctgggtaggcaccatagtaggggaatgtctaaagacccactgctctgagatgtggtcagagaggtttctgtggactgcagatgaggcctgagccctgcctatgctcaaagccagcagggttgggggtccgcctcctcactgctcctcaacagctgtaaccctttcctgagggccccgacttttcagaataggagcagagagaagcccagacttccttccctggagtgtagacctgtgtgtgggacctgctccaggctgatccctgtccgcacaggtgggtgatgtccttggctgctgccgtcagaggcagccccctgcacagggaggggctgatcctgcctcagctgtgtggccatgtgggggcagcaggggcctgggccatagctgggggaggccagaccctgagggctttgcagggcggccagtgcagtgatgcctggcgcttccagctgagacaggagtccggacagaggtgggcagggtggatggcttcgggcagggaaggcgggtagaggctgcatgtgggggcccctgtctgcctgtccttagggtgtggattaggctctggcttctgtgatggtgcaagaggcaggatggtctccagacaccttcttgcagagtgattttgaccaatgcctttccagcaccttcccctggttatgacagggagctcccaggccaggccacatgaccccacaggtaggctgaccccatggacccactggagactttgagggcagagctcgggcacctttcatcttccttgggtggtcctcatgtcgctgtccgctcatgttcctggtgttctggcatcaccttgtgccggtgggggctgggctcccgtgaggtcctagggcagaaggaggtgcttgcagggcctctcgctgctactgggacatccacaggacctaatgtttatgtggaatctccaggctgccatcgagggctcctgagctcatcctgaggacccagggtccatctgagctggctgtgggctgagatcctggctggggccctgctgtcaacctctcctccaggccctgccttgtccctgctcctgtgctttcctctcttcaggacaaatggtttgtccttatggtcccctttccactaggattttctcatcctcatctgtctatcccagccggatttaaagcagtcacttcagacaggagccacagggagcctgtgagggagtagtgcggtggtggtgagtgtggctgccctggctcccccagctcaccgtggtgctgtccttgacccacgagctgttgagaagggtgcagagcccctggcacagccaaccctgttgcccccagtgccgctgcccagcttcggccatccaggtggtgggtagacagaggagtgaaccccaaaggtgtccatgccccagttctaagccctgtggccaggtgctgtcacacagcaaaggggactttgcaggtggaattagggttagggatctaaggatgggaggggaacttggtttatctgggtgggctcagtgaccccttggaatggctgagggaggcaggagagcctggaaagattcgaagtgtcacagagatggtgccgtcattgctggcttaaagacaaggggccaggagccaacaccagaggccactccacaaccccagcgccagtcagcaaggaagccgggtgtcgctcacacaaccagaaggagctgagtttggcaacaacccaagtgagcctgaagcagattcgccccagagcctccaggcgtgagtggagcccagtccagcgacaccttggtttggcctgtgagactgagaagagagccagccacgccatgctgtgcctggggtccacagagccgggaggtcacacatgtacatcctggaagctgcccaaggtgtggccacttgtagggcagtgagaggaagccgtcgcggggaccatgctgccttctctgggctcacgactgttctggaaaggaccccatggcagacttggcaaggtctccacttcaggggcaaacatctccatcatcagcaactccaaaccccagccacttcctgggagttcaggaactgtgtttagccataatgtcccttggggtttggtgaaaaacaacttsctttttatttgtgggaaaactgtattatattgccttatttatttttaatcatgtacaatattcatgtacaaatgttagagccattcgggtaggattctctctaaattatttattgaagaggctttgtaaatagtgcaccagtgacaggtgctgcctgtttactcgtaccaaaaatgaagacaagccccacacccacctcagcccttgcttggccatgctgtggccctttggaaatgaccctgtgtgctcccctcgcgacccttgcatgcctttcatgcctgatgccgtagagtagaacacagccccggaatgcttccagttgcttgcaagggaccatgccggcccrggtggtccatgcctgcggggtgtctgtatcctgcaggaggacgcccctacagacccagcaacccaagttgccagcccgtgtttctcagactttaaagccaccagggcttctggaacacctgtcatagaagcaataactctaactctatactgtagagatgagtctggtccgaagcagattagtaatttagagataagccatgcatacaagtttgccccattctctggcttggggtggtgggaggcggggagctgccactcccaaagcctccaccccttcctgaagacccagctatgaaaccgcagttcctgtgggttgggctgcccaggctggtcagagctcagcaccccaggtctggtgagcagacagagccggcgttaaaccccgatcaggtcattgtcaccacacccttgcttggatgaggaaggaaggaggcaaaggcacccactccatccaagatccattccaattgatgagcctcagtactggcctcacactgaccaacggtggtatgctgcagtttgttggtttggtgcagagtctaaaggataacatatcaaggcttacctgtgataggccattttaaggaaatggtggcactctgaaggctgtccccattcaccttccacaatgctggtaccatcctggtagaagagccctctgaacaggacacctgttcaggcctgggggccccatgctaggcttgcctgggtgtgagaaggtcgaactgggtggcttaggccttcaaattgagcttgggggtgtccaagagaggggtcttattcgaggaactcacataccccaaataaccatcagtgcacaaatcattccatgctctttggcaccaggcaggagatgctgcaggcaggtgtccgtagttggcaaaaatgggcagtaggggaaatggagttgcttcaacctttctcagtcccggccctcactgcacccaccaagtcaagcagagctgggtgggctgagaccagcatcccagctggactgagcctggggggaggggctggagccaaggagcccccctgggtgggggcatcaggagcaggggcagggcctgaggactgctccccctgcatggagggcaggccaggatggagcccagggtagactttgaggaaggctcagtgggctcagcagaaggaaggctcttctcatagttgtggtttttcacagatggatttgggtgatctgagtgtggtcaggccctgccgttggggaatgaatgccacacggggtttgtctgtaagctgcagtgtctgtgattctgtgtgaactgacagcagggagctgaaggacaggccccggccttgggagaggacacgggcatgggctgctggatgcagggctcccagggctgtgaaggcagaggggtctctggaggcagacagggtgggctgggggccagcagcagggggcagagccccagccagggcagctgcttcctgcacatagacattcctcctgcgcagggccaagtgcccatgagcacagccccagacagacacggtggggagcttggagccctccgctcacctagaggagccctgggacacgcactggaaagtattmtaggggcttcctgccttatccttctgtttgttcatacacttagtgaaagcagatcctgtactaggatgtgaggatatctgtcacctgcgtggtccattccataaacaccagattccatttcagttgccacacattttggggctagacttccctaaacaacatgccattgtgaaataatgcatatatttgtatttttaaatttccctgaaaatttaatctattctgttccatatgaagtctgtttcactaccttaaaaaatagatactccactagaggctgtgcttaattcaaatccatgtgtgtgcctgcattacatgtgtgaacacgtgtttctgttgtgtgtgtcatgcacatctgtgtgttgcatagcataagccaaatgaaaatcatttgttcatgggattcatatgaggaacaaaattaaatttgaatacagtcagataactgccacgcagggcatttggggaaccatccccgaatgccctgatgtgatttccctcagaaaatccttgttattagaggagaaggtctgggcaggggcagcagcatctcagacatcaagtcaactttatcatctactacatcagcactgaagtccaggggcattgaggcactaactaggttccattttctttggtttggttacttattttttctttttgggttctcggtgtgcagaggctgtagagagagcctcagggcggtgaccgctgcaggaattcggccctccagctcccctcc

SEQ ID NO: 94264 - DNA, 24572 bp, Homo sapiens
  misc_feature (1)...(24572): n = A,T,C or G
acctttacttggcatcccaggaatggcgcccctgcttaaaagtcttagcagtggtggccctgttagtccaagaagcctcaaaaataactctaggacaaaccttaatgatttttatccccgcatcaggtcttggatattctaaattttaaagccttctattggatttcagataatagaattcataagtaccaatcactttttttgcaaactcctgaattatctataaaacctatggctgctcttggacattcctgtgtagaaactattgatcttacgtgcagtgctagggctgatctaaaggacactgtgcataaaattcctgattctacctggtgcactgatggtggcaggttcattttagaaggagagtgtcaggctgtgctatagttagcctaactaaagtcatagaatcaggtcctccacccagaggaaccaccttggctcaaaaagctgaactaatagcccttaccatagctctctaactggggactggaataaagctcaagtgacttacatcctgactcaatctgtgtgtcacgtaacgcatgcccatgaagccactggaagcaaagaggatctctcacagcccagaacaccgccactaaccatgcacctctcacagcccataacacccccattcagcatgtccctgaaatttcaaccttgctagaagacatacatctcctgattgaaatagcaaaatccttcactgtccggctcatcaaaaagataactcaaatcctgccagaggggataattatgcagataaacaaactaaatcaactgcttggccaccctctttcctcacccaatcccaccaaaaccccagcacaccccacaaaatttacaaaaggcactaaaacagggtttcacattcattcctgaaggatggcttcaaaactctgaaaataaacttctcctccctgaggttccacaatggaaaatcctctaaaatctccgtcaagctaaccacctgggggtggaaactttacaagccttaagagatcctctttttcaagggcctaacctagcctagccccaactctatgggacatttcycaatcctgcccaatttgctgtcaatcaaatccggagggtgcaatgaaccccctgccctcctccaacctattcaacgtagagggcctgtcccaggggcgtactggcaagctgactctgcccacatgccctctcataagggattcagataccttttagtctttatagacactttcacaagctggactaaagccttcccactcgaacagaaagagcatcagaagtaactacggctcttttagaacacattattcctcgatttggggtccctcaatccctccaatcagacaatggcctggcctttatttcttctattactccaggaatcagtgaggccctccaaataaaatatcacttacatgctgcttaccacccacagtcatccaagggccaagctagctttgaaaacccttctcactaagctctctatagaaactcaactgttttggataacttttcttcctattgccctgttaagatctagagtaattcccaaaggtttcaacccaccttagcccttttgaaattatttatggatgcccctttttacaaacggacttattacttgatccagaggctcattatctgtctcaatgtgatgcctccctgggcaaactatccaggccactactgaataccaggataaattttgtccaaaatctgacccctcctcatcagaactaagacctcctgttaacctggggactgggtatatttaaaaactttgcctccagacagaaaaccccttccagccctctggactggaccctttcaagtcctcatagcctctcccacagctgttaactgcagggattctccccttgggtccacctttgccacataaagtctgtactgccgccagaactccagcctgcttacackttgagcccttggaagatctatgatttttgttttgcaaacaannnnnnnnnnnnnnnnnnnnnnnnnnnnnnnnnnnnnnnnnnnnnnnnnnnnnnnnnnnnnnnnnnnnnnnnnnnnatgatttttgttttgcaaacaaccaggtgacactaacctctcttcaaaagcaaaggataccacgtaagccttttgctgtgtttatcattcactttcctttccctcccttgtcattcatttccttatgtactctagaagcgtttttaggtcctccaattttctgagattatcctcaattcacttacttttttttttttttttttttttgagacagagttttgctcttgtcacccaggctatagtgcaatggtgcgatctcggctcactgcaaccgccatctcccgggttcaagtgattctcccgcctcaacctcctgagtagctgggattacaggcatgcaccaccatgcccggctatttttttttttttttttttttttgtatttttagtagagacagggtttcaccatgttggccaggctgttctcacacttctgacctcaggtgatccgcccgtctcagcctcccaaagtgctggaattacaggcatgagccaccacacccagccaatttactgtctctttatccaatccccatttctcaagacccacatacaattattcagcttgcactagatttttatttgcagggtggtttttctaattatacttggagcaacttttgtaacagtccttgaattagaacaatgagactccttttttctttctttcatgtttttctctttatctctcatataaaaacttcccaatcctcttggtttgacaatatcatcttcagcatctcacatgctattgtgagaggagaaaatactctgtgtggctggctttgccgtccacaacctgctactccaagccatgtagattcttcttcgtaagcacaccctgtctccaatcaaactgtactgttgggatttcattattcttctcaccactccttcccaccccgaccatttccttctgtgctggtaaattggaaaccacctccctcttcgtgctatcatattacttcccccaccatccacacttacaatatcactgaaacttccttaacttgtaatgttattttgggaggtacaccttgttataatgacactcatgcagctaactttgactcatttgaggccttcgcctcctacaatcaaaactctgactctggccaggtgcgctggctcacacctgtaatcctaacactttgggaggtagaggtgggtggatcacctgaggtcaggagttcgagaccagtctgaccaacatggtgaaaccctgtctctactaaaaatacaaaaattagcagggcgtggtggcaggtgcctgtaatcccagctactcaggaggctgaggcaggagaatcgcttgaacccaggagcagaggttgcagtgagccaaggtcacaccacttcactccagcctgggcaactgagtgagactccatctcaaaaaaaaaaaaaaatctgactctatctcatcactgccaatttataagccgttaaactggaccagtatagtggggctcccagtatacagcacccctgcactcctaataccttcatgtatgttactataatgatgcaaccagtgcaggaaataaccaccgtgccacctggtttacatcctatgccatgcactggcacccgcctgcttttaaacctcctccatcagtacataaacatagtctttcccccatatgagtcctcttaaaaytgtcaaaaggcccatttccttttttcccaacattttaattaaaataatcatcctgcccctcctgggctcttatggcttagcagccccgctaaaaactatttaaacccttttcaagctttggccctatcccaccttgatcattctcttcactatggtgattgtagcctgggaacaatagctcccacccaaatcactgtcttaaacatcacttctaattcagaattcccttctagaaggaaaagggccctgggacttactgtggccggagttgtgggaactatcacaactcttaccccttggggaggttttacttaccaggaaatcacaagtaagagaacctaccgcctcccttgaaatagcaaaagctggcacccatctatcagctctacaagtcattagactcacaagcaggattttggtgtctggtaacaggtgagttctggattacctcctagctgaacaaggaggggtctgtgctgtcatcaacaggacccgttgcacctacatttatgtgtctggagaagtggaaaccgatgcccaagaaatcatcaaacaagccaaatggctacacacactttcccaaagcaaccaagactgggccaaaacttttactgattggttttcaaaaaatcacttggcttcccccattccttagacctttatcttctgtcatttttcttttaatatttggtccctgcctttttaatgctctgattgcttttctatgttctacatgagaacaattccacctgcagaaggctatgcattcccaacactggcctgcaactgcagctcgatttacatggggcttcttgatggaaataccggcctgcaactgcagctcccatttacgtggggcttcttgatggaatcccatcacgtgcctccgtgcacaagttttcatgaccctttattcccttcatgactgagagcaagaaagggaaaaacgtgacctayccccctgaactccctttcagcagcaagtagtcaggcgcactggacacccctcttcactgtgccgtttcccctttcttgagaccccaacaggaagcaggtggacatgagcatggcagaaaaggaagggtcaaagatttcaccaagatatttgtcagagggaaaatgaggacagcaaagatcacctggagaccatcaagcaggccccaggtggggtgggtggaggggagcctctttatttgagaaatgtagaatgaattagacttccctattatctaaagttggcacctggttccaggcctcttttcaacctaaaacttatacataactagaatttctatacatctctggaatgcagcatgctgaaactcactgtgcaacccctgccttgtgtgtgtctgtataccatgcaggtttgcttgctaaattgagcctgtaaaccaaaaagtacctcaaacaggtctcaattaatttagaaagtttttgttgccaaggctaaggatgcacccgtggtacagcctcaggagggaggacatccttgccaagctcaagggtgcacccctgaccacaagggcccaaggtggtcggggcacagcttgcttttatacattttagggagatatgaggcatcaatcaatacatgggagatttacattggttccatctggaagggcgggacaacttgaattggggggcttccaggtcataggtagatttaaacatattttgattggcaactgactgaagaattattatcagcagaaaggagtgtctgggttatgaaataggggttgcagggagcagatgatgccttcaggtagcgggatttagagagaaaatagatggtaaatgcttcctatcagacttaaggtctatgtcgatgttaatgctgggggttatgatgtggcatggcctgaacgtcttccgggttaaagtttagagcaccctggcggacagggaaccccattcagatggttgctggggggccttcgaattttatttttggtttacaagccttcccatcagctgcgccagggtcagcaaaccacagtccatgggcccaatctggcctgccacctgcttttwgtaaataaagttttataggaacacgcccacacctctggcagctgctttgcaagcacgcagcagggttgagttgttgcaacatagaccacagggcctgccaagcctcaattatctgtgctccgaccctttaagaaacacttctctcacccctgagctaagcagaataagaggggctggacgtgcaggactcagagtgggagcgaggagggctggggtgaggacagctttgtcacactctgtttttctgtcactcagccctgggggctccctctgcctgagggcttcgtcccctgctgcctggccgtgacccgcagcacaagcacagataagcctcagggaacaaaaggcagggctgccacggaagcccatccaccaatcctcacctctcacctctgtgtccgccctgctgggaaatattccaggctttggccaargccagtgcagccccaggttcccragcggcaggttgggtgcggaccatggcctctcacaagctgctggtgaccccccycaaggccctgctcaagcccctctccatccccarccagctcctgctggggcctggtccttccaacctgcctcctcgcatcatggcagccrkggggctgcagatgatcgggtccatgagcaaggatatgtaccaggtaggagtgggggtcactcggggggcctgggtctcacccatgttcccacccacagatcgtggacgagggaagggggtcactgcctcctcacttggggaggcggggagcctgggtctcaccctataccacccgcatgcagatcatggacgagatcaaggaaggcatccagtacgtgttccagaccaggaacccactcacactggtcatctctggctcggracactgtgccctggaggccgccctggtcaatgtgctggagcctggggactccttcctggttggggccaatggcatttgggggcagcgagccgtggacatcrgggagcgcataggtaagggagaggyccaggtggggatggccctggatccatccttcaaggcctccctctgtttgaagctggcagcccccgttcctgggtgagcgcttacccaccttgtggccctgtgcgcacgaacctcctgccagcccactgcctcctccaggckgtgtcgggcactcatgaggcctgactctgatagggctgggagcagcacaggtgccccgatccccccagtctccttgagctgtttctggagcatgtgcaggacggaactacagggaagcctctggtcccagcacacactcctgagagccccggccgctgtccagggccccaggcaccagctctgctttgtgacagggtggggtttcagaagctgaagcctcccctcaaatctcagcagccttccttctggaatcttgatgtgatacacaaaatatggaggtatgggcagagtattcgcctccggagtacacttttctgggagagacacaggagcaggagtgtgccctgggtttaatgattgattgtggcattgagggacatcagcttggtgagctccacaatggccatgctggttaatacgcgaccgcaacagccaagagggtcccaaccccaagtccacaaacttttcaaggggacccagggtcggcagaggccaggaccccaagtggacatcagggcacgcaggctcagatgcctgtggtatatggcttcccttttccccattctgtccccttggccgcaggttcttcccctcccacaacctggccctgaacagcacacaggatagggcagagacagggagggggtgagggcctgattcctggagtccccagctccaacagaggtcaaggctgctgcctcactcacccctcatccttcagtctgtcatccatcacacctgtggtgtgccagccctggaccaggtacactctttgtgccagccctgggccaggtgcagccctgactcccgggagctcactctctgcttggggaggcactggtcagtgtggcctgagaaagggcatttgagctgagctctgtcaagagtgccccaggagcgttggctccaacagcaggggggtcaagatggccctggctctacacacagagaggctytcattgggcagagtccaccctcctcttcaggcaggcagccagggtgccacggtgggtggggtccagccctcacagggccctgctcagcagggccacgggtgcccaacactggcttctacagtgtgtgcgggacactcacggcccactctgtcctgcacccaggagcccgagtgcacccgatgaccaaggaccctggaggccactacacactgcaggaggtggaggaggtaggggacccggggtgggggtcagggccgggaggaggtgggagtgggcatgctggctcaggggctgcctggaattggccagccagcagggtgggatcatggccgggaggctggtggctgaccctcagcccatcctagcatctggtgagcggccacaggggagggttccattacctgggaatggtgggaagactggtaaggaggcttctgtctggcagggaaactgagtcaggagcctggtcctgtaggcagggccagagaggctggaggcaggaggccgagttggagtctaggctgcagaacatgtccctgacactcaggataccccaccctgtgggctgaagtcaacctcagcctacccggagtgtggggactcagtccatctagcaacagccctcacaggccaggcaacaggctgggggcaccctcctccatctctgcaccaaagtcctgttcttggaaaagcccttgtcccggagcggagatgccccagcctcctcctcccatgcacaccatcagggaggagtagaggcaggcccagcccctgctacctggagctgtgccacccatggggggtttgtgggggtgttctggcccctgcccctctgagctccacccacagccgtccctgcttcctcagggcctggcccagcacaagccagtgctgctgttcttaacccacrgggagtcgtccaccggcgtgctgcagccccttgatggcttcrgggaactctrccacaggtgagcctggccccagggcggtggactggagcacagctcagagccaggctatggggaggggtgggcactggtccctctggtccttctgccyctggtccccaccccagcctctgtcacatggtatggggtgcaggcacctcccaggtcctctttgctctgggctgagtctaaagacaaccccaggtcccagggcaggctcaggtgctccctggccgagcgcccccatagtgcccactgacctctgtccccagggctgaagagggcttggtgcagacttccatatcttgccagggcctgtccccacctcaccccgagattgccaggacactaaagctgcctgatgccctccacttccctcctccagcctccctcatccccgcatgggggtgcacagggcaaggccttgaatggagtcagatgggattcctgagaaatgcggacagagccccttgggacccagcagtcccgtctgcaggtctgagcacaggacagaggagagaaactccacggccagggagggtccttctgacagggcccccagcccagacagcttgctgcatggaccgtggccatgaataaagctcacaaacataacctggccagcttcagcaacacccaggccatccccacctgcggccagcacgagatactttctgtgtctcttttttctttataagaaaacctggaggtggaggagggtgagagtttgtgaacatggaggcggaggagggtgagagttcgtgaacatgcaggcggaggagggtgagagttcgtgaacatgtaggtggaggaggataagagttcgtgaacatgcaggaggagggtgagagttcgtgaacatgcaggaggaggagggtgagagttcgtgaacatgsaggaggagggtgagagtttgtgaacatgcaggcggaggagggtgagagttcgtgaacatgcaggtggaggagggtgagagttcgtgaacatgcaggaggaggagggtgagagttcgtgaacatggaggaggaggagggtgagagttcgtgaacatgcaggcggaggagggtgagagttcgtgaacatgcaggtggaggagggtgagagttcgtgaacatgcaggaggagggtgagagttcgtgaacatgcaggaggaggagggtgagagttcgtgaacatgcaggtggaggagggtgagagttcgtgaacatgcaggaggagggtgagagttcgtgaacatgcaggaggagggtgagagttcgtgaacatgcaggtggaggagggtgagagttcgtgaacatgcaggaggagggtgagagttcgtgaacatgtaggcggaggagggtgagagttcgtgaacatggaggcggaggagtgtgagagttcgtgaacatggaggcggaggagggtgagagttcgtgaacatgcaggaggaggagggtgagagttcgtgaacatgcagcaggagggtgagagttcgtgaacatgcaggaggaggagggtgagagttcgtgaacatgcaggaggagggtgagagttcgtgaacatggaggaggagggtgagagttcgtgaacatggaggcggaggaggatgagagttcgtgaacatgcaggaggagggtgagagttcgtgaacatgtaggcggaggagggtgagagttcgtgaacatgcaggaggaggacggtgagagttcgtgaacatgcagcaggagggtgagagttcgtgaacatgcaggcggaggagggcgagagttcgtgaacatggaggcggaggagggtgagagtttgtggcgctgctgcttgggctgttctgggactctgtcccctctggcctagattctggccagtggctgggccgagcagctgttggcagaggtaggcccagcctggtgccaccctggtccctggggtccacacaggccctcaggcacccgctgtccctgggaaccacagactgcccggctgaccctcttcagcaccactgccgggccctgcagctgggtctcaccagggccgtgatgctccctcactcccccagctccctctrctccaatgttcagggctgagaaaggaagagccacaggtcctgatggatcctgacaggcaggagaaggcaactggccaactcctggggtggaggtgggaggtgccctgccttccttgccagcctgaggctcagaaaccccatccagcckggggccaggccctccagtggccccctgcctcacctgctgccctccattctgtcccccacctctccaggtacaagtgcctgctcctggtgrattcggtggcatccctgggcgggacccccctttacatggaccrgcaaggtaagggtgggctctgagagccctacccagcccaagcagcctkggggctccgcgtgcaggaagccctgctggaagcgtgcgtccagcagccgatgctgcrgattcggccccatctccaccaggcccagggaaacactcactccttactgcggcaagagcggctccatgaactacccagcaccccagtgtttccactgagctttcagatccaggcgtggggactggcaggasggacagcttctggtgggggacatttgagatgccccagagctgtagcagaagcagtgggaagaggaagggccagggctccagtcaatcaggcgttggggacccctctgcccaaccccccagaggctcagtttcacatctgccctgcgccctgccaggctgcccatagcagtgagcaccactgtcagggtcacctcgcagggaacctcaaccaggccggccgaggggccaaggagcctcctgtgcccatccgcttacgggagagagcctgcacattgcatccactgcggtgcctgcccacccactccatgggagcctgtctgtttctgcagagcccctcctgatttgggagttctcaggcaggaagggagggatttctgggctgatcctcaaactactactgaaagcagggacctggggagggccccagggacacggtgcctggggtggcagggctgtccctggggaccagcacagcagagggagaagctgcgctaaaacgctcaggcctgaggtcatggctgccacgcagcagtgcccagatttgaacccaggactcccttccacatctcccctgctatcgtgtacggattcgtggtagggtcgtagcctaccagcccattagctaggcaggcatcccgctggactggcctgccctgaggtgggactcacccgtcccgagcaaaccacccatctacaggcatcgacatcctgtacycgggctcccagaaggccctgaacgcccctccagggacctcrctcatctccttcagtgacaaggccaagtgagtgacccacagaycctcacctctgtgcagggctgggcttgcagggagctcaggtggcccgaggcgggaggggcgggagccaggcaggaagggctccccatgctcctccagcacctggcgctctcccgcccaccctctgggaggccaaaggcactgcgttcacagggagtggggaggccgggcgaggggagggctgcaggcgtgtgcagggtgcagagtccactgctctggaagttcccagcttcacagcaaggagtgaccaggaaaggactgagggcctgaggcccagtgccctgaccrgcctcygccctggctcagcttccaggggctgccccaagggacaacgtgggccacacacagtgccccctgcagtcccaatctcacctcccgctcctggtgtccagattctgagccaggccgggcagggggtaggggaagggggccagacctcacaggcggttcccatccagctgcagcctggcaactggaggtgccgttccccagaacagagaggacttcggggagaagtcaggaattcggtgttggacgtgggaggtctgagatgccagctggaccacacgggagggtgaaggaagcggctgggtgtgagtcaggagcctggggagaggccggggctggcccctccatctggagttgtagagacggacacatttaaagtttcaagcctggccagtgtcccctggggcccgaaagcagtcacctttgggtgatgtgagaaatgaaggctgaccctgtaggaggggctgggggagagaaaggggcacacagagtggagggagctggccttggtgcccccatggcagggtcacacagctgggcccaagggccagcgggactggacagctgagggacccacgacccacccggtcccactctggcccctgagcacaaatgcagctggggcgggccctcctgggggccccaccccgtctcactcccgtgaaacaggacagccagcgagactgccctggccttcagcccaaactgagaggctggtgctcagcctrcttctttctccccagaaagaagatgtactccyrcaagacraagcccttctccttctacctggacaycaagtggctggccaacttctggggctgtgacgaccagcccaggatgtgaggcctggcagggatgggaaggtggagggcgctgggcatggctgagaggtggggcgctggcctctcactgcactcagggattctccaagccccccaccttcatgcctcaagaaccccaactagagccccagaatccgcctgcatcaggcagtcaaatgccccaccctgggttcccccattcctcgactggcccgaggctctgggcagggtcatggcccccactgccgcttccacaaacactgtccccccagaggtcccagcacaccctcgggcactttggacctggccctgccacatctccccactcctgggcctcagcttaccccttctgaaaagacgaccttggccataaacccaaggccccttatgttacacacaggaacaaggcgccaggaatggtgccctagcccagtgggcacagagggccagtgccggcttcgcaggcacgctgggactgaggggctccgcagggaggtggtggcacgtgtctctgctcctgcagccacccactgcctcctggctgggccctacacaagccatgctctccctggcagacgaagctgccttcccggtccaaagttctgaacccggacaggactcctctgcggaggataccggcctgtggtcagagagcctgtgctgttggggctrgggcagacagagctaatgccccatctgccccyraccctgcccatggtgctggaccaagccccctcgtgtcttccaggtaccatcacacaatccccgtcatcagcctgtacagcctgagagagagcctggccctcattgcggaacaggtgcatgggctgcactccacaggaggagamagggccactggctggattgtcragggcgcggcctgcagagaaggaaccatccctggtgcacagagaaaagggagcctgccagagagaggccctcagtgggggtgggggagagaggacagggccccgggtacactggctgygggcagggccagggggatacagccccagrgacagatgcagcaatggggcaggtgtggatgctcccaacccttccattgctgtgtgaagcagtaagtgaggcccagtgagtgggtgggctgggagaaggggaggccgaaggggccagagatgtgcccacagataggtgggcgtggatgtaaagtgagggttggcagttcctgcaggcttgtccagctcctatggcagggcaagagctgagcatgagcacttgggtgtgaccagggkttgatttggccactgcaacatccacactctcaggacactgcaacatccacactctcaggacacaggcggctgagagtggcctcaggcccagcagctctgcaggccacgagacaggaagtcccacctactttcatctgggtcctgtgtcccacagggcccattgccagccaccagtccagagtccaggaaggatccccgggctgcagccagsttcccatgaggttgcaaggccgtgcctgccacgtttgtcctcctgggtccactcataaagccactgcctagggctgggttagtgccagggtgcccctgtaagctaaatgccacccgcacccgcgggggaaggcgaggggtcaggcgctcacacagggaaaggctctagggtcgtaaaggtgggtgrggggtgtgagctgggcagagaaggaagagaacaggaccagacagcagggcacagtcaagggcagaggcacagggacctggcagagtgcagattgcaggggcacatgcgcagagaagacgggccagggccagagtagagagcagctgctgctccggggacccacctggggtggccatgagagctggtggctggaggccgggaggacccgtgaccagaggtaatggcactgaggggcccagggctggagagaccacccctcacctgtccagagctgaggcaggagcagtgctgcggaggatgccaggtcgggggagctggccctgagaggagagggggcctgggagccagcaccctgagccctggccctgatccactccagccctgtgtagcccaacagcccttcccctccttgcccagtcccctccccctgcaaggcactctccactcttctcccccaggggccacaggcagacctcccctctgtctctctgaaccctcctctgtctctcccagacccagatgtttccttctgccctggggtagtcccaggccctgccccaggcaaagtcaaactgggggctccaggggctcccctgcaccaaggcctgcagagtcagtttcttcctcccgcaccacagagggcggggcttcctgcccaccccacccatgtcrctgcccaccagcgccatctcccacacagggcctggagaacagctggyrccagcaccgcgaggccrcggcgtatcygcatgggcgcctgcaggcactggggctgcagctcttcgtgaaggacccggtaaggaggcccctggcattgggcagccctgcacccatggggaaggatgaggggctcttgcccagccccctcaagagggacactggctcctgagaaggagggggcggctgcccggtggtgtggcctyggtgccagggattagtctcggcaggagccacgaagtcacagctccyggcctctgatgcgggatctcaggacggcctgtgatctcccagtgggaagktgcccatccaccgcctcctaaggggtggggtccctgctctctcccggccytttctcccccggctcctctggaacctgaagctggggcagatggtgcaggccaagagctgtcacaaaggcccgtacagggcctctcacccacgcactgagccaggcccctcctgcaggcgctccggcttcccacagtcaccactgtggctgtacccgctggctatgactggwgagacatcgtcagctacgtcatrgaccacttcgacattgagatcatgggtgrccttgggccctccacggggaaggtgagagggagcgcctygagggccttttgcagaaaccaaacccgccacccctccttgagcaggactgtgcaccaggtgcaggggaggccggggtcatccgaaagcccagattgcaggagcgtccagaagggcccactctccaaggggtatccagtaaagcgtatcctgtcgcccctgctcccaccccagcccactgaggtcaccaggtgcagcctttatgattccactcggaacatccttccttccctctgaccagaccctggaaccaggccggaagccccacgcctgggcctggctgtgtctctgagtggcagtggggagggaccttcactgcaccaccctgtcctcccgtgtggctgygggtgcagagggaggagagcctgccctggcctgggtgctcaagggccccctctgtgacctgcacagggctgtcaactcccctcatggacrctgggtgggtggtcctcactcaggtgagcccatcctggctctggccagctgtcggtcagggtcaggcaggtcccaggcgggaggctgacgtcagcccgccctgtgccccccaggtgctgcggatcggcctgctgggctgcaatgccacccgcgagaatgtggaccgcgtgacggaggccctgagggcggccctgcagcactgccccaagaagaagctgtgacctgcccactggcacacarctggcactggcacamacctgtmccatgcccaccctgagggatcaggagcaaacagaccctgcaaggtcctccaggcctggggacaggaaagccactgacccagcccgggaggcagaaccaggcagcctccctggccccaggcagcccttttccctccagtggcacctcctggaaacagtccacttgggcgcaaaacccagtgccttccaaatgagctgcagtccccaggccatgagcctcccgggaatgtttaataaagggcctggccamctctcctcactgtgtggggtggtctgtgaaagagtgagaggagagcatctctgctccctgagctgcctgattgtggactttagggggacactcctcatcctggagcccacagggtagatcctcccctggaggaggtgctgtcaccacactctagccccagawgtcacacccccaaacgtcctcacgcaccacatccaggtgaacccacayrgcgcacagggctggttggagacccctgtcatggacaagggtacctgcgtgctggagagcgcacagccaggacctgagcccatgacacgtggaagcctccaatggaaggtcccctatgctcccatccagccagtgcccacccctcaactgcctgacttctgtgaccatagatcagcctggcatatttgaatttatttatttattttgaaacggagtttcactcttgttgcccasgctggagtgcagtggcaygatctcagctcactacaacctccacctcccgggttcaagcgattctcctgcctcaggctccggattagctgggactacaggtgtgcaccaccatgcccggctaatttttgtatttttagtacagatggggtttcactatattggccaggctggtctcgaactcctgacctcaagtgatccacctgcctcggcctcccaaagtgctgggattacaagcgtgagccactgtgcccagccatagttgaatttcatggtcagtggaacacacagcaggtcctccactgtgccagcttctttcacttactgtttttgacactcacatgtaccgtcgtgggcgccggtgtgtctttgttgctgagtgccgtcccgtcatatggacgtgcgtcrtgggcgccggtgtgtcttgttgctgagtgccgtyccgtcatatggacacctcatgatttgttggttcatcaccatagttgagcatctgggttatttctattttggggctgttatgaatacggaggtagtgaaattcttactcaagcctttgtgtggccatatattttcatttttcttggataaataactaggagtggaattgcagggtcatacaataggcttaaccttatacgagactgccacgaaattctccgaagtggctcttccatgtttcattcccgcagctacagcgtccagggtgctccacgtcctcacccacactccatgttgtctttttttgctagggggtgtaaaatcctgtctgatttggttttagtttgcatttccctgatgcctattgatgttgagcaacttctcataagctatcggccgtttgtagatcttctgaaaagtgtcagttcaaatattttgttcatatttgratttttatcttcttattgtcaatgtgtgatcattttaaaatatattctagatactatcagatacgtgtggcatgaatatttcctccctctctgtggcttacctgttcattttcttttcttttttctttctttccttttttttttttttttttttttttttttttttagagaaagaatctcactccatccaggctggagagcagtggtgtgatctcagctcactgcaacctccacctcccgggttcaagagattctcctgcctcagcctcccaagtagctgggattacaggcatgcaccaccacacccggctaattttttgtgtttttttgtagagacggggttttgccatgttggccacgctggtctcaaattcctgacctcaagtgatccacccacctcagcctcccaaagtgctgggattacaggcatgagccaccacacccagcttacctattcattttcttaattgtgtctttcaaagagcaggtattttcaattttggtgaagtcgtatttatgaatgagtttttttctatggtctgggctgtttgtatcttgtctaagaaacctttgcctactttgaggtctggacggtatcttcctgtgttttcttctagaaactttacagtgtcagcttttgtatttaggtctatgatacacctcatattaattttgtgcacagtgtagaaagggggtcaaggttcatttttatccatactgatatcccagttccagtaacgtttgttaaacagactttcctttccccattgaactgacttgacaactttgttaaaaatcagttgactacacattcataggtctatttacagcctctcttctgtttcattgcatcctcgtgtcaatcccatgctgttgcaaatattgtagctttacaataactcttgaaattaagaacaagtcctccaatgtttttctcccttttaaaggttttttgtattctacatcctttgaatttctgtgtacgttttagattcatgttgtctatttcttcagaatagcttgctgaaattttggtaggaactgcaccaaatctatacatcaacttaaggaaaatggaaataaagtataaattccatttcacaaacagaaatgtaagtattttaaaattactttcagcaatgtttctagttttcaacatacagcaaagcgggagggggttatttaaggaaagccaggaacccaggaacaggaaagccacagatccagcccaggaggcaggaccaggcagcctccccggcccccagcggcccttctccctccaagtagaacctcctggaaacagcccacttgggcgtagatcttttgttagatttattcctaggtgtttgatcttgttgatgctgttataaatggcatttgaaaatttttatttccagttgtttattttttaatatataatctcatttttttctatattaattttgtatcttctgaccttcctaaattcacaaggcctagtagcttctttgtagattcctttaaattttctaagtagataatcaaactctctgtgactaatgagagttgtacatcttctgccttttatgtactttttcttgcttcattgcaacggtgtaggccacaaatacagtgctgaatctcagtgatgagcgtgcaccttcttgccttggagaygtgtttaatgtctcagcgtcaggctgacggcagcagtggggtttctgcagctgccctgctctcagaggcaggaagtccccacctgtcctagtttgcagagggtatttatcactaacagctgttgtattttgtcaaataccttttctgcctatggtgagatgatcataaagttatgtttctatattctacggatgtgctgtttcgttgactgacctcttattttctcgtaatatatttgtcaggttttgatagcaaggttacattggtcttgtaaagtggtttggacagtattttcttttcctttatttatcaattaaatttgtctagaatagggactattttttttttccttatattttggtagaattgtccagtgaagctttatgggacaggagctttctttatgggaaggatttttttaatgacttctaatgttttcatagacatagagttctttagatttttgtctctctctttgtgcccgttttggtaatttgtgttacccagagcatgcttgattccaagttgttgaatgtgttggcataaaatcatccataatatccctttattatcctttaatgcttacgggctctctattgatttccctgtttcattcctggtattggtaatttatattttctccttttttttctcccattgatcagtcttgctagggggttactgattttattagtctctccaaaaaagcgacatttaccatcattttctcaattgtttgctttgtattgatttccactcttattgttccttttattttacttcctttggttttaatttgctcctctttttctagcttcctatggtagaagcttaattgattttaaacatttatttgttttctagtatgagcatttaaagctaaacatttccctctgagcgctttcttcactgcatctcccaaattttgatcaatggtgtttttggaatcactcagatcaaaatattttataatttccttgtgatttattctttgaaccacagactatttagacttatactgtgtaatgttcagatatttggtggatattctaaatgtatttttgttttttatttcaaatttatgtctgttgtggtcagagctcatactgtatatggacttcagtattttgaacatgtactgagagtctgttttataaactagcagcagtctcggtgactatcccatggacaagagatgaacgtgtcttcgtcattgtcaggtgtgagcttctacagatcctcaggtccrcctggatgacagcattgttcaagtcttctttgtatcactggggttttgttgttgttgtttgttttggtttggttttttgcctgctttttctatgaagtactgagagtggggtgttcagttctcccagcatgaatgtggtcttgtctccttctccctttatgcattcatcttcatgattttgaaggtctgttgttaggattgttacaccttcttgatgaactgactatttttatcattgtgaaatatcgccccttacctctggtaatactctttgtcttaatgtttgtgtgttttctttccttgggccacttgtctctccatacaaaagagatgaacgatttctatttcttttcttttctttttttttttttttttttttgagacggagtttcgctcttgttgcccaggctggagtgcaatggtgggatctcggcttaccgcaacctccacctcccaggttcaagcaattctcctgcctcagcctcccgagtagctgggattacaggcacctgccaccatgcccggctaattttttgtatttttagtagagacggggttttaccatgttggccaggctggtctcgaactcctgacctcaggtgatccacccaccccggcctcccaaagtgctgggattacagatgtgagccactgcgcctggcccagtttctatttcttgatactctgcccatgcggagtattttccctcaccactctcttctaggaaccctgagttgggaaagtccattttggttcgcaccaaaagaccaagccatcatatccatgaaccaggctcaagattttcttcctcggtcatctagtcccagggaaccctctcaaggcgattatgtgtgaggttaaaggagaggcacaggtgcacgtaggtgatgatagggtgacccaggccattgttcatctaactgacttgtttccacccaccctgcttggtctggccctgaagaggccatgtccatgtacaatggattgctgttgcaccaccactgccacccccaaacttaggaccccataacattcagctcatggtgggcagctcaggtcacacagttacttggtgtcccctggccaggggcccartgtcacaccaaatgctgcttttgaacagtgagtacttctctgctgcagacaatttgctctcgttccaggacttcacctcctcttttggggtttgccagagatgccacatggtgcccctttctactgcagataccattggcaccatggtggtatcatagcgtgaatctactcaagaacctgcctgtgccctggccccactcagaaccaacagccttctgagtcccccagcaaatggacatttccaagtgaggtgcatgcagcctccaaaatccaatgaggcccacacagcaccatgcctgttcttcacagtaggtggggcaaggtacaaaaacttcccctttaccttggaagcaatgtctcagcatgccccagaccactgagcctctaaagtcttaatctctgggccaggccctgagactgtaaagtttgtctcccaccctctggaatgaatggtcttagaaggcatccaaagaactttccagtcaatcctctccagttcgaattggcatgatgtcatcaatacagtgaaccagcgtaatattctatagaccatccaggtgatgaaggcccattaggcctacattgtgacagagaagagagggttaacatcagtctgggccagacagtgaacttataatgttayctcttccaagtgaatgcaaaccgtgtctgagcctcccctctgatggggattggaaagaatgcctttctcccagtccagtgaccacatacaagttccagaggccctgctgtcctgttgtactaaggataccacgtctagcacagcacctggactacgggttacagcttggttaagtttatgtaacccactaccattcaccataatccatctggcttctactggggccatattggtgaattaaagtctctgaaagtagaactaaattccgttagtacacccaggatgtggtatgttttgctgggttatcttggccatgggaatagggatgattttgcaataaacttccccttggcccttcctgctattccagctcttactcctgctatgtacagccaccctgcttcacaatcaaatgccaaggggatggccacagggtgggcctggcccttcggttccattatgaatcagatgtgaaccaagattctgcttctaccagcccccattctaatgggggaggagtgatggcattttgtgtccccttgtgtgtgtgtcagctcaggccctggatcttgcagccttcaaggggcctgggcatctcctgtcgtgagtctgtgcttcctctggcagatggccagaggtccctttcaaggaggctccagggagctgctgctgcatgaattgcaggtcccctccaagagccaaaggtgtgagctgtggctcaggcactgaggggtcaatgcccctgagaggccaaagatggrgaataggaaatgtccaatgggcaggacccatgcaggtcatgggctgcaggcaggcagtgctgggctgatgagagaatgtgagttgtgggcacaaagaatggtaaggacagagtgggggtggcatcagatgccaggagaggacaccttacatcagagaggggggatgtttagtaggttcttgtactgctgtagacaactacctgagactgggtaatgaataaagaggtttaattgactcacagtcccgcaggctatacaggaagnnnnnnnnnnnnnnnnnnnnnnnnnnnnnnnnnnnnnnnnnnnnnnnnnnnnnnnnnnnnnnnnnnnnnnnnnnnnnnnnnnnnnnnnnnnnnnnnnnnnnnnnnnnnnnncatggctgggaggcctcaggaaactgacaatcatggtggaaggtgaaggagaaggaggcatatcttacatggccggagaaagaggaagagagcaaaaggagagggggaggggccacacactcaaaaaaccagatctcatgagaactcactcactatcatgagaacagtaagggagaaatccacccccatgatccaatcacctcccactgggcccctcctccaacactggggattacaagtctacctgagacttgggtggggacacagatccaattctacctgam

SEQ ID NO: 94265 - DNA, 79155 bp, Homo sapiens
attatgagcgaggttgagcatcttttcataggtttttgcagttaattgactgttcatatactttattttacattgtttgctggtagttttattaatttttcaagaacttttaatagattacaaaactccatcgtgctttttgttaaatctaatgccttttgtaaaacatatgataaacatgtcctttgcttacaatgtacattacatacagacattaaaaaacttaagtggtcaaatttattaataattctgtaatattttcaaggtttggaataacacttagaactttgtactcacaattatttttttaaattaaacttttaaaaacatgtttaaagttttatatttttacagttaaatctttgattcttctggaatttacaaatgataacatatatcttcctataatattttttattcttaagatttattaaacttcttggatctatagatttaaaatttccttcaaaatcagaaaattttggcaattatttttccattctttttttctgtgtactgtcccctcactcttttcctagtcctccaattgtatgatgttaaactgcctgatattttgtcacaggtcatagatgttcattatttttcagtcttttttgtctctgtactctcaggagctcagctgagctgaaagaaagaaagctgagctaccaggtgctatagtaggcgattaaagcaacaagccaacaataaaataaaaacaagattttaatcacttatgcagtggtataagcaagggcccaaaactggagaaagcactgcccccgttccctgcctccccatttccccccaggaacatagagagtctgctgggtcagcatgtaggtgggggtcatctcaccattgagagagccacagacaaaaggctggggcagttctgtggactctgggtggcttacaggaaggtgggggacagggccaggagtagaaagtaaagttctgggtactgattcagagaggaggaaaagcatcttcaagatttctcccttctctgcctagcctcttttcccagtaagagggaaattctaaattctacttgagccttttgaataataccttccatttctctcaccatatttatggtttcttctgctttcttaaacacagaaaacacagaatagctgcataatgtgtaatagctgtttaaatatctgccagtctatgtttgacacttccatcatctctgacacttccatcatctctgtcctttcatggttggcttctctttttttttttttttttggtgccagacaatccttttattgttcactgaaaaatgcaggtctgcaaagagtcaattgcattgtatattgaatgcaaggtctgatattgcaagtatatgtgtcatagtataacatataaaatattacatattttacatagtgacagtacccacctcttctaaacactaaaatgtaacagattaaagtaaaaagcctcctattaaatgagaaacaaacattgcaatcataaacaaaatgctctaagcaaagtactttaaaattgttttgtgtgacgtctattttgtctacctggagttaggaatggtggagcccagaaaaaacttagctaacaaaaacagccaacgcccttaaggaactcttcccaggaagcaggctgctgatgcccaccacaggctgccaccctgtctggtggcccagccaggcttcaggactgcccaagggcccacactgaatgctaatgcctgtctggggctgcattgaggtgagtgggaggagtactaggcaggaagaagctcctgtcacaactgcttattctgcatccactctatggatatgaacacctagtgtttttcttgtgaatctgccactctccacaaacactgaaatgtgattgagaagacaatgttaacactgtgaacaaaagccattttctatgcagtctgcagatatcatcattaattcctttcagccatgttttcattaagatgctctaaaagagtctgctgctattatactgccagttaggcaggccaggataaaggtaacaaaacttctccagttataactactaattaaaatgaattaaaaataaatatagcttatactagagagcaacacagtctctactattcacatggtaatatattcagaaattgcaacaatattcacaattctccaaggtcgactttaactatatccacatttccttccaagcagaaaatcctgaatggaagggagtgtataacatcaatacctcctgttcatctcaatattatcagggctcagacagctcattatagataacaaatgcaaaaaaaaatttaaaaagcatcccaatatatactcagcaacagaggaagactaggccctccctctgggcttccttggcataaggcaaaccatggctatttgcaacaacagtgtctaagctgactctggaaaagctcatgatttaggagaaatcagaattacaaagttccttcattcacaggtaacaaaggattattaaaaatttcttgaactaagacaacagtctcaccatcaaagaaaattttctcttcatctgagtttttataaatgagattttacgatacccagcttttttagttaatatgaaactatcagcacacagagaacatcctcaaaactaaagatgagtaaagctaaaattctcagattttccatatgctacagatcaacaaatattttatcagaatatccatttaacagagttttaagtccataataaccaactatgtaattttcttattcaaaaaacaccaggttaagaataatcccagtttgatgaatatcttattccccttgatggtgcacagtaaatgtcactgttcagtctttatatctttgactcttccagtcaaaggaaaatcttgtataaagctgcaaaactgcaaactccagcagaagctctggtgttagagatgaagtaaactttaggggaataaccacaattgcctatcagactatgtacagcattgctggaagcctactctttttttaactctattatctctattttatctctaaacattctaatattttaaacatggggattcactgatatcaataaaggtctagttcatgagtaaggttttggtctctggaatgatgtgtggctagcccaaaacactggccatgtttgttttaaacatgttagtttttcttcccaccacaatctgtcaaacccacccatctgtcctgccactgccactcccctagcccctcagcatttctgctcctctcttttgaatgttctgctgcatgtatggtattcactgagacatcactttaactgagacatcactttaatatataggtcatttgcatttcacgctatcagctcccccaaaggacatcaactgggaacaattcctaatagtaaaggcatgacttgctggcattttccctttataaaggaaatcaaaggggttgtctggaagcagaaagaacactttgggtattcctgtaaagggaatgccatatctgctaccaaaacccagaaatattgactagatctaaagagcatatgaattgtacagtagggtgagatttggcagtttaagatctatttccaattttacattaaaccatttatgttgtgggaagtcagggaccccaaacggagggactggctgaaaccatggcagaagaacatggattgtgaagatttcatggacatttattagttccccaaattaatacttttataatttcttatgtctgtctttactgcaatctctaaacataaattgtgaagatttcatggacacttatcacttccccattcaatacccttgtgatttcctaggcctgtctttactttaatctcttaatcctgtcaccttgtaaactgaggaggatgtatgttgcctcaggaccatgtgataattgcgttaactgcacaaattgtagagcacatgtgtttgaacaatatgaaatctgggcaccttgaaaaaagaacaggataacagcaattgttcagggaataagagagataaccttaaactctgaccaccggtgagctgggcggaacagagccatatttctcttctttcaaaagcaaatgggagaaatatcgctgaattctttttctcagcaaggaacatccctggggaagagaatacacacctgggggtaggtctatagacagacccccgggtgtggccatcttttatggtctgtagactgcaggggtgaaatagaccccagtctcgcatagcgctcccaggcttactaggaagaagaaattcccgcctaataaattttggtcagactggttgctctcaaaatcctgtctcctgataagatgttatcaatgacaatggtgcccgaaacttcattagcaattttaatttcgccccagtcctgtggtcctgtgatctcgccctgcctccatttgccttgtgatattctattaccttgtgaagtacttgacgtctgtgacccacacyctattcgtacactccctccccttttgaaactccctaataaaaacttgctggttttgcagcttgggggaaatcacggaacctaccgacatgtaatgtctcccctggatgcccagctttaaaatttctctcttttgtactctgtccctttatttctcaaaccacccaacgcttagggagaatagaaaagaacctacgtgattatcagggcaggttccccgatgcatttaggtgaaagtgttaatatcacgggagcaaatgcaagtgtcaacaacacccttttggctcatttcctcgtgcttctgtttatacttccaccagctccagtgaagcctgtcccaggacacatcactcagcttcctgcacagctgctcagagataaaacaatgcacttcacctcaactagcccagtaactggcactcaggtggtgaacactgcagccaacggccttggggcagagcccatggaaggctttaaacaggggaaggacttacagacattgcataaaaattcttgattttagaataccttccccaggaagtcagaaaacaatcatttgtagttaataaaatgtaatctatactcaaaaacaatgtaatgcctcagaaagcaaaacctggaatggaagaacttcagaaaaatacaacttaaccagtatcttactttggctaaattatcatagtcggtcagtgtaatttatgattgcatttagaagcccagcctaccgtgctctaagacggtactagtgaagtacacgaaaacagttaacagaggccatagccctttagcctttagtgacttcagaactacaaagataaaagttaaccacaatttgacattcagatacttacttgctcagtacaaattggattaggagacagttaaacaccagattgtcattcacttattgtgttctcagggaactcctatttggataacaaaccagtggttctctgcctggctgcatatcagaatcacctgggaagcttttaaaactcaccatgtgcccaggccaattaactctggagagtggagcccagaatcagtaggatttatattgccccgggtgattcccgtgcagccaggacgcacaagactgaggcatccctttcggagagcggttgtgtgaaagccaagtgaaaggaacacgtatctggatagttttgttttttttctcaattccacctgaaaaaagggattttttagaaagaggcacagttgtgcttcctctaaaagatgtagtctgcagtttgggaagtgctgattcccacaggttatctggagcgctggttgtaaagaagaaagtccttgtcttggcagattaggcagagtttgaggcttcggcagctgcctcctgcaacaaagaatacccagatgcccatgagcaccaggattataaatgccgacagcaggtttattccataatgaggacttacgaaggtgcaggctgacaccagcagacgggtcaggagaactataagaaggatgtaccactttttcttctcgcagccatcaaaaaatacaatgtcccagaacacgtgcagcaagatgatgaccagcgtgcaacggctcggtggtgatggtgaagacttagagggcgagcgcaggccagaaggcagtgaaggcgcagctgaagaacacggccaccgtcatggagaccgcagaagccgaccagggggcccgtaggagacgccggaagctctggttggtttccwttactaatttctctcctaattatggaatatattttcttgcttgtctacctggtgtttttttattggatgccagatattgttatttttacatggttaattgttggattttgttgtatttcttaagatagttttgggttttgttttggtaggcatttaattaaaataggtaaaaacatttcgaggyttgctttaaatcttcagagggcaggtccagagcagccattattctaggggttaatttggccccactcctaacgtgatgccgggctgaagattctacccaatgcccatgtattagaaggtctttctaccacggagcacaaactatgcctaggtctgtgtgggctgattagtatttagccaaatattcagaaagacctctgcaaatatccacagctctgttgcaataatttcccgccagtactgtaccctgtaaaatccagctctcttagactcccaggactgtaatgtctgtctccttaattcagggagactgcagccacctgtttaaattttttcttccttgcactgcagcctagatactgactctaggcagaaagctggtaaaattacaaggctcattttatttctcttattgtaggaatcacattcctgtgtatcgcttgttgtccaggcagttaaactacttcatrtattttgtctggttttctagttatttgaagtgtgtattagtttctgttcctgtgcagtaagttaccacaaagttagtagcttaaaacaacacatacttgtattatctcacagtttctatgggccaagagtccagatatggcataatagggttctgtggttaaggtctcataagcttgaagtcaaggtgttggcagaactgagttctcttctggaactgggtgtcttcttccaagctcatgtggttgttgatggaattcaattccttgcagctgtagggctgagatccccattttcttccatctctcatccaatggctgctctcagctcctacaagtaacctgcagtttcttgctatgagttcctcttgcaacactacttgtagggcaactttataaagtcaagcccagccatgacaatctcctttttgattgactcagactcaactgatttggaaccttaactctatctgtaaaatccttttatctttcccatgttctattcacttgaagcagatcacaggtccagtatggactcaaggggaggaaaattatatgatttattgggagtgaacctagggtgtgtccatcacaagacaacagagtaaatctggtctttattacttccttttagtcaaaagtagaatcttcctctctaattttaattgtttcatcttttcaagttgtacctgcaagtacagccataagaatattgaatattacacattcttctcttgttgccaattgtaagaaaaatgtttccaatattttaatcactaaatatttgccatgatgtattaagaaattatctatagatttacatgttatgaagaatgcaaatcatattgaatgttaggaaagtccttgcatattatgaattttctctattggtctattagtaaattgaattgttaacattgaaccacatttgcatctcaacaattaacctcgcttgattatattacatgggacttttttttctggtatttcaattagcattgttttcattaacagatataaatgaaattaccgtagtttttgttttattctatttttgtgatgtttatataatatatatatatatttcattraaataatctggaagtttttcttctttttatgmtttgggatggtttaaacagcctagaaattttttttcctttaatattttatacaattcatcatgcctggcattttgagggaaattgcaattatttgattatgttctcaattccttttataataactagttggattagaatttctaactcttctgaagttagtttcaatattttgctagaaaatcattctacttgttttgaaatatatatatatatttttatcatactttagttttagggtacgtgtgcacaatgtgcaggtttgttgcacatgtatacatgtgccatgttggtgtgctgcacccattaactcgtcatttagcattaggtttctctcctaatgctatccctcccacctcccccaccccacaacaggccccggtgtgtgatgttccccttcctgtgtccatgtgttctcattgttcaattcccacctatgagtgagaacatgcggtgtttggctttttgtccttgcgatagtttgctgagaatgatggtttccagcttcacccatgtccctacaaaggacatgaactcatcattttttatggctgcatagtattccatggtgtatatgtgccacattttcttaatccagtctatcattgttggacatttggcttggttccaagtctttgctattatgaatagtgcagcgataaacatacatgtgcatgtgtctttatagcagcatgatttataatcctttgggtatatacccagtaatgggatggctggatcaaatggtatttctagttctagatccctgaggaaccgccacactgacttccacaatggttgaactagtttacagtcccaccaacagtgtaaaagtgttcctatttctccacatcctctccagcacctgttgtttcctgactttttaatgattgccattctaactggtgtgagatggtatctcattgtggttttgatttgtatttctctgatgaccagtgatgatgagcattttttcatgtgttttttggctgcataaatgtcttcttttgagaagtgtctgttcatatccttcgcccacttttcgatggggttgtttgtttttttcttgtaaatttgtttgagttcattgtagattctggatattagccctttgtcagatgagtagattgcaaaaattttctcccattctgtaggttgcctgttcactctgatggtagtttcttttgctgtgcagaagctctttagtttaattagatcccatttgtcaattttggcttttgttgccattgcttttggtgttttagacatgaagtccttgcccatgcctatgtcctgaatggtattgcctaggttttcttctagggtttttatcatttcaggtctaacatttaagtctttaatccgtcttgaattaatttttgtatcaggtgtaaggaagggatccagtttcagctttctacatatggctagccagttttcccagcaccatttattaaatagggaatcctttccccatttcttctttttgtcaggtttgtcaaagatcagatggttgtagatatgcggcattatttctgaggactctgttctgttccattggtctatatctctgttttggtaccagtaccatgctgttttggttactgtagccttgcagtatagtttgaagtcaggtagcgtgatgcctccagctttgttcttttggctaatgattgacttggcaatgtgggctcttttttgttccatatgaactttaaagtagttttttcccattctgtgaagaaagtcattggtagcttgatggggatggcattgaatctataaattaccttgggcactgtgtccattttcacratattgattcttcctacccacgagcatggaatgttcttccatttgtttgtgtcctcttttatttcattgagcagtgctttgtagttctccttgaagaggtctttcacatcccttgtaagttggattcctaggtattttattctctttgaagcaattgtgaatgggaattcgttcatgatttggctctctgtttgtctgttatttgtgtataagaatgcttgtgatttttgcacattgattttgtatcctgagactttgctgaagttgcctatcagcttaaggagattttgggctgagatgatggggttttctagatatacaatcatgtcatctgcaaacagggacaattwgactttctcttttcctaattgaataccctttatttccttctcctgcctgattgccctggccagaacttccaacactatgttgaataggagtggtgagagagggcatccctgtcttgtgccagttttcaaagggaatgcttccagtttttgcccattcagtatgatattggctgtgggtttgtcatagatagctcttattattttgagatatgtcccatcaatacctaatttattgagagtttttagcatgaagtgttgttgaattttgtcaaagggcttttctgcatctattgagataatcatgtggtttttgtcgttggttctgtttatatgctggattatgtttactgatttgcatatgttgaacaagccatgcatcccagggatgaagcccacttgatcatggtggataagctttttgatgtgctgccggatttgttttgccagtattttattgaggatttttgcattgatgttcatcagggatattggtctaaaattctctttttttgtcgtgtcactggcaggctttggtatgagaatgatgctggcctcataaaatgagttaggtaggattccctctttttctattgattggaagagtttcagaaggaatggtaccagctcctccttgtacctctggcagaattcggctgtgaatccatctggtcctggacttttttttggttggtaagctattaattattgcctcaatatcagagcctgtaattggtctattcagagattcaacttcttcctgctttagtcttgggagagtgtatgtgttgaggaatttatccatttctcctagattttctaatttatttgcgtagaggtgtttatagtattctctgatggtagtgtgtatttctgtgggatcggtggtgatatcccctttataattttttattgcttctatttgattcttctctcttttcttctttattagtcttgctaagagtacagcacactgatgggtcttgactctttatccaatttgccagtctgtgtcttttaattggagcatttaacccatttaaggttaatattgttatgtgtgaatttgatcctgtcattatgaygttagctggttattttgctctttagttgatgcagtttcttcctagcctygatggtctttacattttggcatgtttttgcagtggctggtactggttattcctttccatgtttagtgcttccttcaggagctcttttagggcaggcctggtggtgacaaaatctctcagcatttgcttgtctgtaaagtattttatttctccttcacttatgaagcttagtttggctggatatgaaattctgggttgaaaattcttttctttaagaatattgaatattggcccccactctcttctggcttgtagagtttctgctgagagatcagctgttagtctgatgggcttccctttgtgggtaacccgacctttctctctggctgctcttaacagtttttccttcatttcaaccttggtgaatctgataattatgtgtcttggagttgctcttctcaaggagtatctttgtggcattctctgtatttcctgaatttgaatgttggcctgccttgctagattggggaagttctcctggataatatcctgcagagtgttttccaacttggttccattctccccgtcactttaaggtacaccaatcagacgtagatttggtcttttcacataatcccatatttcttggaggctttgttcatttctttttattcttttttctctaaacttctcttctcacttcatttcattcatttgatcttccaccactgataccctttcttccagttgatcgaatcagctactgaggcttgtgcatttgtcatgtagttctcgtgccgtggttttcagctccatcaggtcctttaaggacttctctgcattggttattttagttagccattagtctaatcttttttcaaggtttttaagttcttttccatgggttcgaacttcctcctttagctcagagtaatttgatcatctgaagccttcttctctcaactagtcaaagtcattctccatccagctttgttgcgttgctggtgaggagctgtgttcctttggaggaagagaggtgctcgatttttagagtttccagtttttctgctctgttttttccccatctttgtggttttatctacctttagtctttgatgatggtgacctacagatggggttttggtgtggatgtcctatctgtttgttagttttccttctaacagtcaagaccctcagctgcaggtttgttggagtttgccagaggtccactccagaccctctttgcctgggtatcagcagcggaggctgcagaacagtgaatattggtgaacagcaaatgttgctgcctgatcgttcctctggaagtttcatctcagaggagtacccagccatgtgaggtgtcagtctgcccctactkggggggtgcctcccagttaggctacttgggggtcagggacccacttgaggaggcagtctgtccattctcagatctccagctgcgtgctaggagaaccactactcttttcaaagttgtcagacagggacatttaagtctgcagaggtttccactgccttttgtttggctatgccctgcccccagaggtggagtctacagaggcaggcaggcctccttgagctgcggtgggctccacccagttccagcttcccggcccctttgtttacctactcaagcctcggcaatggctggcgcccctcctccagcctcgctgctgccttgcagtttgaactcagactgctatgctaggaaagtgcgaggctccgtgggtgtaggaccctctgagccaggcgcaggatataatctcctggtgtgccgtttgctaagactgttggaaaagtgaagtattagggtgggagtgacccgattttccaggtgccrtctgtcacccctttctttgactaggaaagggaattccctgaccccttgcacttcccaggtgggaggatacctcatcctgcttcggctcatgcttggtgcgctgcacccactatcctgcacccactgtccaagactccccagtgagatgaacctggtacctcagttggaattgcagaaatcacccgtcttttcctcactcacgctgggagctgtagactggagctgttcctatttggccatcttggctccaccccccacccaaatatatttttatagattttagaaaccaagctttcrtagttcaatttccactgtactgtttatctcccattttgtatcttattttgtgtatttctattcctttatttttacataggttttcaaataatttcttttactattcattcacgaaaagaaagttcttttggtttgtttaatagttggttcaatgatctaatttttttttctttactgattccatccttttcttactttaagcaatgttcactttattttctttctagagttgaatattttcttaatttatctagtattttttcattagttaagtgacatttagcctatatcttttcttctatgctctacttttactgtatcactatatctcataatttcatatatgcagggattatttttttctaaaaaatttgtgatttcagatgttattgcctctttgacacaatattatggagatagttattaatattaatattttcatgttaaaagggcagaaattttctgttagtttttatattttctttttaaaattcctagtttcatatcaaacatgataaaagatgttatctttacaatttgtaggtcttctaataatatattgatgttcatattatggccaaatacaggatcaatatatatatataaatgttctatcagctcttgcaaacagagacatttttatgcatgcaaagttctttcactcaagtttagtttttgaaaactacaaatatgttcaatgtgatgcatagaagtttttaaatatagattttcatatatgtaagttcaggaattatggtccactgttatgtctttagaccttgatgtagcctatattatacactcaaaaacagcacaagttcatattcccttattcacaacattaatattcaagggaggtctgaaaactgaaactgttttctttattcatccagctgcaaaccttgaccagaaaaaaagggagaaagactgtttagtttttatttatagtacttattttaagtcttaacatttcacttaagaaatgttaacatgcttgattatggaatgctgctccaggcccctttgaggtgttaggtaatactaggtatcatcaatattctatcttttcaaaatccaaactatattatgttctaaaatacatctggcccccagcatatttgataagagattgtgaattgtcttcacttttgtccagacatttcttcctagaaaaaaatgcatatgatattttggtttcttatctttaatagcagtaagactaagttataatcttatttagtctattagtttttttttcattatactttaagttctggggtacatgtgcagagcatgcagatttgttacataggtatacccatgccatggtggtttgctgcacccatcaactcgtcatctacattaggtatttctcctagtgctatccctcccctagccagccacctcctggtaggccccagtgtgtgatgttcccctccctgtgtccatgtattctcattgttcagctcccacttatgagtgagaacatgcgatgtttggttttctattcttgtgttagtttgctgagaatggtggtttccagcgtcatccatgtccctgcaaaggacatgaactcatccttttttatagctacatagtattccatggtgtatgtgtgccacattttctttatccagtctatcattgatrggcatttgggttggttgcaagtctttgctgttgtgaacagtgccgcaataaacatacgtgtgcatgtgtctttatagtagaatgatttataatcctttgaatatatacccaggattgggatggctgagtcaaatggtgtttctagttctagatccttgaggaatcaccacactgtcttccacaatgggtaaactaatttacactcccatcaacagtgtaaaagcattcttatttctccacaccctatccagcatctgttgtttcctgcacattttaatgattgccattctaactggcatgaaatgttatctcattgtcgttttgatttgcatttcactaatgaccaatgatgatgagcttttttccatatatttgttggctgcataaatgtcttcttttgagaagtgtatgttcatatccttcatccactttttgatggggttgtatttttttcttgtaaatttaagttccttgaagattctggatattagccctttgtcagatggatagattgcaacaattttctgccattctgtaggttgctggttcactttgatgatagtttcttttgctgtgtagaagctctttagtttaattagatatggtttgtctattttggcttttgttgccattgcttttggtgttttagtcatgaagtctttgcccatgtctgtgtcctgaatggtattgcctaggttttcttctaggatttttatggttttagttcttacatttaagtctttaatccatsttgagttaatttttgtataaggtgtaaggaagggatccagtgccagctttctgcatatgactagacaaaaccatttattaaatagggaatccttgccccattgcttgtttttgtcagatttatcgaagatcaggtggttgtagatgtatggcattatttctgaggcttctgttctgttccattggcttatatatcttttttggtactggtaccatgctgtatttgttactgtaggcttgtagtatagtttgaagtcaggtagcatgatgcctccagctttgctctttctgcttaggattgtcttggctatatgggctcttttttggttccatatgaaatttaaagtagttttttctaattctgtgaagagagtcagcagtagcttgatggtgatagcattgaatctgtaaattactatgggcactatgtcgattttcacgatattgattcttcctatccatgagcatggaatgttttaccatttggtcctctcttatttcctagagcagtggtttgtagttctccttgaggaggttcttcacgttccttgtaagttgtattcctaggtattttattatctttatagcaattgtgaatgggagttcattcatgatttggctctgtttgtccattattggtgtataggaacgtttgtgatttttgcacattgattttgtattctgagactttgctgaagtttcttatcagctcaaggagatttggggccgacacaataaggttttctaaatctacaaccatgtcatctgcaaacagaaacaatttgactccctctttttctatttgaatacactttattgctttctcttgcctcattgccctggcctgaacttctactactatgttgaataggagtggtgagagagggcatccttgtcttgtgctggttttcaaagggaatgcttccagcttttgcccattcagtatgatattggctgtgggtttgtcataaatagctcttattattttgaaatatgttccatcagtacctagtttattgagagtttttaacatgaaggtttgttgaattttgtcacaggccttttctgcatctattgagataatcatgtgatttttgtcattggttctgtttatgtgatggattatgtttattgatttgcatatgttgaaccagacttgcatccctgggatgaagcagacttgatcacagtggataagctttttgatgtgctgctggattcagtttgtcagtattctatttaggatttttgcatcgatgttcatcagtgatattggcctgaaattttctttttttgttgtgtctgcaaggttttggtgttaggatgatactggcctcataaaatggttagagcggattccctctttttttctattgtttggaatagtttcagaaggaatggtgtgtctggaatttgttccttccagtgggttcttggtctcgctgacttcaagaatgaagccgcggaccctcacggtgagtgttacagttcttaaagatggtgtgtccggaatttattccttctggtgggtttgtggtctcacttgacttcaggagtgaagccgcagaccttcgcagtgagtgttaaagctcttaaaggtggcgcatctggagttgtttgttcctcccagtgggttcgtggtctcactgacttcaggagtgaagccgcagaccttcgcagtgagtgttcagctcataaaggtagtgcggacccaaagagtgagcagcagcaagatttattgtgaagagcaaaagaacaaagcttccacagcatggaaggggacccgagcgggttgccactgctggctcaggtggccagcttttattcccttatttggccgcactcacattctgctrattggtccattttagagagtgctgattgctccattttacagagtgctgattggtccatttttacagagtgctgattggtgcatttacaaacctttatctagacacagagtgctgattggtgcatttttacagagtgctgattggtgcgtttacaattctttagctagacagaaaagttctccaagtccccacttgacccaggaagtccaactggcttcacctctcggtctcccctctaaagaggacaccccaactgctgttaggaattaggcaatgacagctctagctacttcctgctggataggggcaaagaaggagccctgcagttgtagtgtcctccagaggggaattcttcaggccagtgaaagggtcagcaggttagtccaggggtcctcagtagaagttgttagttgagctcatttggggttccatttgtgaagaccatctgtagctcgatggcctcgatccagaggaaacaaatttgaaaaggagattaaaaatacagggctcaaaggcaaataatagcaagatggctgtcacgggacctagaaaggggagaagccatgttgcccaactccagagtttggtatagagtttgaaaggcattgtctgacttcagaagccttttcctgtaaactccgagtggcatctcatactgtccctgactggttagtgtaaaaacactcttcccctaagaaaatgcagagtcctcctttcttggcagtgaggaggtctaggcctcagccgttttggagggtcactgctgccaaggagtctatttgggattgtagagtaaggatagatttcgttatttcttgcaaactgtctgagaaatcatttgagagtgtgtggtagtaggataatgaagtaaacaaactagctattctggttcctgtagcagtagccattcctaaccctataagtaggggtattagttgtatggctctgcactgacagacttgagctttgagggatactgatatggtctgatttcctggggcaatgttactgttgggacttagaaagactaagattcaggtggctgtctagttagtggggaggcagatataggtcgatgttccacatacaaagaatataccttggctgggtgggcagacctgattrtgtatgttaaaatggtgtgtgagtttgttgttttcattttcccatactcctagagtacttgccaaggtagctctggtgagtggctggaaaggggtgttgggagcaaactgagtggctccctgtgttctattttcctattggagaaaaaactgttttgtatctactaggaaccattcgagagagtgattgaaagaggggatgagaaggcattcactagtggtgggggcgctgctgcagggggtccaggagtgaatggtcatgcagggagtatgtttgccattacaaaacctggactgtttgttaagcagggaggaggtgatgatttttggaggccctgagaagcagacaggccatctgaatcgagctgtttgaatgacttggaagttactgtgatcagttggggcttgaagttgtagggtgtaattacactgatgcggtggtaggtgccccaggggcaggcctgataacaggttgcattggatgcattaagggacttggaaagttaagatagtattcgtagttacagggccatgtatgggcttttcattgcttgtgtaataggtgaggttggaaatgtaagaacataaaagttggattgcatgtcctgttagggtattcttggtcctatcagagatggggaacttggctaatgactgaatatttagaagtccggaaagggtcttttccttcttaacaagggtggtaggttaagttggtaaagacccagttttttgtgggaatgggagtggcaacgtaagcagaagttgatagagagatacaaagccaacagtcattttccagggaaggattggactggcttagcagagagtgggttaagttgagagtcttgtagaggtaattaggaggtagtggaaggggaggggcaattgtatgaggtatccaaggaagtaggagggatagataggcaaagagtaaataggaaggtaaagagggtgttctggaagacgagatcattttatccagtctgagttaaaggtaagagtaaattgctgtcagaaggaaggaagataaaaagaaggttgatgtggttaggatttttgtcccagcaggagccagtatatagtcctatggcaaagagtatggttagtatgctgcttaataatatgatgaaatgtagaaggattccattaaagaggcaaggagaggtgttaaagataaagattatgtaggttttcacttatcttttttaaggaggaaggggtttttcttcaggatcagtggtaggaaccttttttgtctgggatgtttccttccaatataggaggtgcaagtcctccaacggttcgcaggtgtatcgaggctggtctggctgatcttgggacccctgagctgatggtaccagaggttcctcagggggtgtccaaaatttaacttgggtgtggtgaatccaagattccactcctgccaccttaactgcagtggggatagagaggattaccgaatatggtccttcccacaaagagttcatagatggggaggtagaggggagaaatttgaccaacactagatctcctggttgaaacaactctgttcccttttctctgtgacatccttcaggtaggtttttaaggtttttttgatattttgccaaaaaagttatatctttgaccaagttggccatttcctgatcaagtgggaggtcatttgtaagaaaaggtcgtccatatagcatttcatatggactgagccccattttgtgaggagaatttcagattctcaacaaggccatgggcaaaaaagtaggccatggaagttgagtttcttgtgttagtttccttaaatacctcttgagtgtttcatttgccttctccaccttccctgaggactgtggcctccaggtgcagtgatattgtattcctggcaccctggaaattccctgagttatcatggctttttttttttttttttttttttttgagacggagtctcgctctgtcgcccaggctggagtgcagtggcgggatctcggctcactgcaagctccgcctcctgggttcacgccattctcctgcctcagcctcccaagtagctgggactacaggcgcccgccactacgcccggctaattttttgtatttttagtagagacggggtttcaccgttttagccgggatggtctcgatctcctgacctcgtgatccgcccgcctcggcctcccaaagtgctgggattacaggcgtgagccaccgcgcccggcctatcatggctttaaaagctgaaccattgtcactctgcaagctttgaggaagcctgaatctaggagttatttcatgaattaggactttaatcacttcctgagccttctctgtcttgcaggggacagcttctatccaatttgtaaaggtagcaatgcagaccaacaagtattgaaatccctttgacttaggcatatgggtgaagtctaactgccagtcccctccaggatagtgacctattctttgttcccccaaaggggccttacaatggaccaagggattattcctttggcacacctcacaggctttgactacttgtcagatgatccagaggagatttggccctgtacatagggatttggccatttgatgagtgttttcaatacccatatgaaaagtttggtggaggattttaagtattttccactggctggctttgggcataagtacctttctttttctgtcattaaccaccctgagaggagaaaactatgcccccatgaaagtccccactctgtttcagttggggaatactggggcttaatctcttggaggggttgttccataccaagggtccttccacaggtatttctaatgggaggttcagcctggcagcaattttggcctcagcatctgcccaacagtttccttctgccttttctccttcacctttctgatggctttagcagtgtaagactgccatctccttgggtttttgcactgcatgcaataactccataatttccttgtagtatttaatgggggttcccccagaggttaggaactccctttctttccatattgcagcatgggcatgtaggattagataagcatacttgctatctgtatacacatttattctttttccctttcccagttctaaggctcgggtaagtgccactagttctgctaactgggcgctggtccctgggagaagaggcctactttcaagtatggttacatcactaactatggcatgacctgcccttcatatcccattctccagaaatgaacttccattggtgtataggttaaggacaggattagctaaggggacttctaagagatcatctcaggtggcatgagtctggactacaatttgttggcagtcatgctcgattggttccccatcctctgggagaaaagtggcagggttgagagttgtgcacatgcatatttgaagcattggtccctcaaggagtagcacctggtatctaagcagtcagttgtatgatagccataaacttcctttggcacctagtatgccatttacatcatgagtagtccagacagtgagatcctttccttgtagtattttgacagcctctgacactaagacagccaccaccacaactacccataaacagtgagaccagcctttggctactatatcaatttccttacttagatatgccactggttatggggttgttccacaagtctgagtaaggaccccaagagctattcttgctctctctgtgacgtataaagaaaagcttcatcctctgggaaggcttaaggctgtagcttgagtttgttccttccaatgctcagacttcagggttgattccctcctaaagcaggggacaataaatgagtaacttgttttccatattcatgtagataatagctccagctttcactaatatatccctctctaataagggtatgggactttcaggcataaaaagaaaggcatgtgaaaagagcaaagtctcccaattacagctgaggaggtgggagaaatacctggttacaggctgtcccaggattccttggatggtaatggaccttgaggacagttgtctgggacaggagattaacactgagaagtctgtgccagtgtccaggaggaagtcaatttcctggccctcaatggttaaacgtacccagggcccagtgagggtgatgacatgagctggcgcttgccccttgcaccgtcagtcctgttgttggatcatctggttgggggcttctggaccagaaaacctttgtcctctggggtagtgcaccttccagtgattgccttggcataaaggacatgggcgagggggcagcttgtttctcattggacaatcatttttaaagtgtccttgtaaaccacactggtaacaagcccaccaggtgactggcctgctccattttctgtcctctttgaaccaccaaggtttgtttgtctaagggccatgactaaggctgcggcctttctctgatcctccttttccttttcagcctgttcctcttggtccctattatagaacaccgaggttgccaggtttaataatgcctccagattttgttcagggcccagggctcacttttggagctggtgcttttctcctgatatctgcagctgattgggtaataaacttatgttttaggatcaattggccctcaagtgagttgggtgatgggagtatattttcgtaagtcctccagtagctgcttgaggaaggcaaaaggattttcttcctttccctgagttatggtggacatcattgaataattcatgggctttttcctaattctccttagtccttctagaacacaggtcaacagatgtttgtgactccagtccccctgatctgagtcgaggtcccagtggggatccatactggggwcggcttgctgaccggtagggaatttgttcctttcttttgctgtcattctatcatttacttgactaagataccaggtatctccaaactctagggcttcagctaaagctacattcttttctttaaaggccagggttagatctaacaatagcatgacatctgtccaagtgagatagaaggtttgccctggaccctgtaggacatctatgtacctatcaggaccatctgaaaacttccccaggtctgccttgatctgctttaaatcagagagggagaaggagacatgtacccaggttgggccaaattcccctccccctacagcttgaaggggacataaccaatagcccaggggtttttgtagtcctttggagatttctttgcttgtttccttctgggtgggggagattagaagaggcctatcgttaattgaaaggagagttaggatatggaggtaagctgagagatcctcctgtgggatgtaaattgcaagctttgcatagttatgtattctccttcagtgaaaagaaagcttggacagaaggtatttcactccatttgccttccctcttacagaaaagatcaagctgcaggatagtattgtaatttatacttccctcagatggccatttttccccatcagagagagaatattggggccaagctgtagtgcagaaaaaattgagcytcttctttttcaggatttgcgggtcaaattggtcccaatggcttaggatgcatttcaagggtgagcctgttgatgcctgagtgtttcccatttgaaagacaaaaccaaccatggttttggtttgtttgtttctctgcctgcccaagaacccacaacggtccctggaccctggtgattggaatagttgtgctcaccgacacagcagcagaaacaacccctgcccaagaaccctcaatggtccctggaccctactgatcagaatagttgcgctcactgatgcagcagcagaaacattagttttcctcctagaccacaaggaggactaaggaaactcagatttagtggcccttaccaacgcattctcgaaaacctgcacccttgcctgtcttcctagaccacaaagaggactgagaaaaattggatttcgtggctcttactgacacattcttgaaaacctgttasagtcctaagcattctcctgttagtattgggaccttacccctgtcctataaaggtkttatgccccaaaaatgaagtggagggccataccctgagggagggaagggatctccagggctggaagagtgatgccttttgtcctcacttatatggataggaaagataccatttctgaagttccccatatcctagcttcaggaatagcttttgttaggcctgctagtctgaggagggatcctaaaattccagatagtcgcccgccccgacagggctttgggcaaaaattacgtctttctgattggtgagcccaggtgcctaaagaaggtaacagagtcctgaagtttatactagaaatcattcttacagtagaaactagaaaagcaccagagacagggagtggtttttagaagaaggactagcctcagagaagagaggcaggaggaagtttgtctgacagacgttaggacccaggaggaaagggtcaggttagataggataaatgggcgagtctcgcttgggtgatgtgactttaagagttccactcatggccgcagggtcaaccagcttgttgtcgggaccccagagctgaatggctttcctctctgttgacccttggctcagcccagaagtacaggaaaagcagaagctggttccaggcaaaccaatgctgccaactccgaagagtcaggggttgttagccctttcctagaaagcctgacacccgtgtctttagtccggtggccatgctagtcgcttttaactggccaacagttaccyggtatttagcccccgaattctaaggaaaaatatgacagaatagcaagtgaaaggggtctgatggtactcacagcttggtgatagtcccttcgtggtygccaaaatgtgtccggaattttttccttctggtgggttcttggtctcactgacttcaagaatgaagccgtggaccctcgtggtgagtgttacagttcttaaagatggtgtgtccagagtttgttccttcagatgttcagatgtgtctagagtttcttccttctggtgggttcatggtcttgyttgacttcaggagtgaagccacagaccttcacagtgagtgttacagctcttaaaggtggtgcatctggagttggtttgttgctcctggtgggttcatggtctcgttgacttcaggagtgaagccacagaccttcacastgagtgttaacagctcataaaggtagtgcagacccaaaaagtgagcagcagcaagatttattgtgaagagcaaaagaacaaagcttccacagcatggaaggggacccaagcaagttgccactgctggctcaggtggccagcttttattgccttatttggccctgcccacaccctgctgattggtccattttacagagtgccgattagtccgtttttacagggtgttgattggtgagtttacaaacctttagctaaacacagagcactaattggtgtgtttttacagtgtgctgattggtgcatttataaacctttagctagacagaaaagttcttcaagtccccactcgacccaaccaggaagtccagctggcttcacctctcaatggtaccagcttctctttgtacctgtggtagaattcaactgtgaatccatctggtcctgggctttttttggttggtaggctattaattactgcctcaatttcagaacttgttattggtctattcatggattcgactttgtcctggtttagtctttgaagggtgtatgtgtctaggaacttatccatttcttctagattttctagtttatttgcatagaggtgtttatagtattctctgatggtcatttgtatttctgtgggatcagtggtgatatcccctttatcaattttattgcatctatttgattcttctctcttttcttctttattagtctggctagcagtctatttattttgttgatcttttcaaaaaaccagcttctggattttttttttgaagggttttctgtgtctctatctctttcagttctgctctgatcttatttcttgtcttttgctagcttttgaatgtgtttgctcttgcttctctagttcttttaattgtgatgttaggttgtcaattttagatctttcctgctttctcttgtgggcatttagtgctataaatttccctctacacactgctttcaatgtgtaccagagattctggtatgttggttccttgttctcattgtctttgtgtcacatctttatttttgccttcatttcattattacccagtagtcatcaggagcaggttgctcagtttccatgtagttatgtggttttgagtcagtttattaatcctgggttctaatttgattgcactgtggttgagagtctgtcatttttttagttcttttgcatttgctgaggagtgttttacttctaattatgtggtcaattttagaataagtgtgatgtggtgttgagaagaatgtatattctgttgatttggggtggagaggtggagagtttaacagtggggtgttaaagtctcccactattattgtgtgggagtctaagtctccttgtagctctctaagaacttgctttatgaatctgggtgctcctgtattgcgtgcatatatatttaggatagttagctcttcttgttgcattgatccctttacctttatgtaatgcccttctttgtctcttttgatctttgttggcttaaagttgttttatcaggggctaggattgcaacccctgctttttttttgctttccttttgcttggtaaatattcctccacccctttattttgagcctatgtgagtctttgcacatgaaatgggtctctgaattcagcacactggtaagtctygactctttatccaatttgccagtctgtgtcttttaattgtggcatttaacctgtttacatttaaggttaatattgttatgtgtgaatctgatcttttcattatgaggctagctggttattttgcccattagttgatgcagtttcttcataacatccatggtctttataatttggcatgtttttgcagtggctggtaccagttgttcctttccatgtttagtgcttccttcaggagctcttgtaaggmaagcctgatggtgacaaaatctctcagcatttgcttgtctgtaaagggttttatttctccttcatttatgaagcttaattcggctggatatgaaattctgggttgaaaattcttttctttaagaatgttaaatattggcccccactctcttctggcttgtagagtttctgctgagagtccactgttagtctgatgggcgtccctttgtgagtaaactgacctttctctctggctgcccttaatattttttccttcatttcaaccttggtgaatctgatgattatgtgtcttggggttgctcttctcgaggagtatcttcatggtggttctctgtatttcctgaatttgaatgttggcctgccttgctaggttgaggaagttctcctcaataatatcctgaagagtgttttccaacttggtttcattctccctgtcactttcaggtacaataatcaaacgtatatttggtcttttcacatagtcccatatttcctggagtttttgttcgtttcttttcactgttttttctctaattttgtcttctcgctttatttcactaagttgattttcaatctctgttaccctttcttctgcttgactgatttggctattgatacttgtgtatgcttcacgaggttctcttgctgtgtttttcagctccatcaggtcatttatgttcttctctaaactggttattctagttaacaatttgtctaaccttttttcaaggttcttgacttccttgcattgggttagaacatgctcctttagctcagaggagtttgttattacccaccttctgaagcctacttctctcaattcgtcaaacacactctccatccagttttgtttccttgctggggaggagatgtgatcctttggaggagaagagacgttcaggtttttggaattttcagcctgtttgtgctggtttctccccatctttgtggatttatctacctttggtctctgaagttggtgacctttggctggggtctctgagtggacatcctttttgttgatgttggtactattcatttatatctgctagttttccttctaacagtcaggcccctctgctgcaggtctgctggagtttgctggaggtccactccagaccctgtttgcctaggtatcactggcagagcctgcagaactgcaaagattgctgcctgttccttcctctggaagcttcgtcccagagggacacctgccagatgccagctagagctcttctgtatgaggcgtctgtcagcccctactgggaggtgtctcccagtcaggatacatgggggtcagggacccacttgaggaggcagtctgtcccttagaagagctcgaatgctgtgctgttagatctgctgctgtcttcatagctgccaggcagggatgtttaagtctgctgaaactgtacccacaaccaccccttcccctaggtgttctgtcccagggaggtggagattttatctataagtccctgactggggctgctgcctttttttcagagatggccctgggaatctaagagaggcattctggcagcagtggccttgctaagctgcagtgggctccacccagttcaaacttccaggtggctttgtttacactgagagrgtaaaactgcctactcaagcctcagcaatggtggatgcccctcctctaccaagctctagcatcccaggttgagctcagactgctgtactagcagcgagaatttcaaacctgttgatcttagcctgctgggatccatgggggtgggacccacagagccagaccacttggctccctggcttcagccccctttccaagggagtgaatagttctgtctctctggtgttccaggtgccactggggtatgaaaaaaaaactcctggggctagctcagtgtctgcgcaaatggccgtccagttttgtgctggaaacccagggcgctggtggtgcaggcaccagcgggaatctcctggtctgcaggttgcgaagactgtgggaaaagcacagtatctgggctggagtgcacagtacagtccctaatggcttccctgggctgggagatggagttccctgaccccttgcccttcccaagtgaggcaacgccccaccctgcttcagcttgccctccttgggctgcacccactttccaaccagtcccagtgagatgaaccgggtatctcagttgaaaatgcagaaatcacccaccttctgtgttgatctcactgggagctgcagaccagagctgtttctattcgtccatcttgccagcaatatctagtctattagtcttactagtgtaatgtatgatgtactttccagggttttaaaaatcatcttattcatccagcgttgaagtgagctgttgtaaaatgtaactacagtaaagataattattttttatcaaaaattaaagaactaaattttctcttacagggaattaaagtgttttatatttttatctttgtactcagtttttaaattatggaaaatggtgtctaaatgccctggagctcaggttgatacaatggcatttccttataaaatgaaaaggattttataataataagatctttagtattttccaacaaatagacttttgtgaatgggatctgaaataggcttattattggccctctgtaattttttttctgcccygcccaggacttgtacacttagcactacagatatttccaaagaaactgtcacctctatcctaacattcactactcaaaacgttcactactcaaaaagtgtgtaattagttcaattattcacatctgctgttaacagtccacaaatattcccccaggtgctcaattcttggcaaaagggagagaggaacagaaaacatattgcaatattaccacttgtagatggcataatgggagttagaaaatgctttgagaacacacaaataagaaattaatttgcccaaaatatgaagaaagatggagacaagaaaaattttggaaagatagagatatggaacttggaaattggtagaaatgttctagtcaatcataggaaagatgttaattgaacaggaagtagcaatggtgaggcacagaggtatttagggagaaaaagctgaagataggcagaaaggaagtttacaaaaagatttttggagattgtgtgtctcgctagagacttttggctgtctttccatgaccatgtttctgaacgaggactgactcatcatctctccctcccatgccttgctgcagattccaagacatttttatactgaatgtgttttgtaaataataataatacaaatgttaagtattagcgccaatgcattccaagatagatctatagacttaaatatgttacataattatcctagcttttcaaattgcaatgtcctaaaagtgatcattgaataaaatgaatagaattctgatggtagttattttaaatagatgtgatagtagtgaagcatttttggaaagaaagaaaattgtgcagaaaaaaaattattttaatctaatgtcacaraagacttggcagttttataaaagagaagagattattaatcatttgcagttttaaattgtatatagtcattttgcatttcawgttttactaaatggttcatttgacattatccattaaaatctaatgctttatatcccagcacctttatgctcatttaatcatttcattttatcttaacagtatgtgctttatttgctttgcaataatgcctmaaaagaaaaagttcttggattatattttgtcagataatgggaactacttagtaataatttatttatagcaggaaaaagatgaataccagcaaattattttttgcctccctttgctttcctatacccaacagrtggcaaactgtttgaaagtaatgactttcttctcaactttagattcttagtgtcaagcagtatctggcaaaaataggaattcaataagtattgttgaataaatcaatacataaaagaagttataaaagagaaaatattgatgattaataaacaaatagtttaaactcacgaatataaaggaaaagccaactaactcaatgagttaatgtattcttccagcccattaacataataaagatgaaaccagaggcacagaaaaattggtatattcaaacactgcttatgaaaattaaattgaaccagactttgataaaaactttcatcactaaaaactatatctttctaaactaacttattcttctgggaatcgatcttaaggaaataatgtgatcttttcaaaaaacagcgctctctgtttttactctacacttggaagttgactgtattagcagcttagcatgatggaagacactagagttagaatcaaaagactagttgatgagtctctgctctactgcttctcaaaatgagaccctggataaatctcttcaattctctgtttcaattccttatttgtttctcaatgataatatatatattttaagatatatatagagagagataaataaggaattgaaacagaatgtaagatttgtcaatgataatatatattttcagagatatatgtagagagagacaaatatcttaaattctgtttcaattccttattgatcaatgataataaatatacattttaagatttatatagaaagggagagacaaatctcttaaactgtttcaattccttattagtgataataagcatatactttaagatatatatatagagagacaaatatcttaaattctgtttcaattccttgtttatcaatgataataaatatatattttaggatatatatacatatatatctatatatgtatacatcttaaaatatatgtatatatgtatatatatcttaaaatatatgtatatatgtatatacacacatatacgtatatatgtatgtgtgtatatacatatatacgtatatgtgtgtatatacatatatacatatatgtgtatatacatatatgtatatacatatatacgtatatacgtatatatgatatatacgtatatatacgtatatacatatatgtatatacgtatatatgtatatataagtatatacatatatgtatatacgtatatatgtatatataaaatatatgtacatatatgtatatatatatcgagagagagagagagagagagrcaaatcagcctatcatccgcaacccttctagcctktccagattatgcgttctgtcattaatcaggctgcagtgaaataatagagttagtctttcatctgtgaaggtgaaggaaaaattagaaggggatttcataaacaacttttccaaaaaattagaaaaaagcgagaggagaaatttttttaaatagagtaatttacatttccataaaattatgaaaatatataaattccaaatactttaactttgatatggtctcctggtacatgatccagacttgtaatactacaccatcttggaattttttctaaccttcacccttcttttctcagtcatcgcaaatgtcttggattaactcatatgcttctttcgtttaaaagtggtgcaatgttattaaaatgaagaccataatgaatcatcagcagtgcctaaatgccctttaataagccataagacagatactctacacttggaaatcaactgtattagcaacttagtatgatgtaaggctccagaatgaaaatcaaaagattagttaatgagtcagtctcttctctactgtttctcaaaataagatgccggatgaatctctaaaattctgttttaattccttaattgtttatcaatgataataaatattatctttacttatctacccctctatgtcattagtttattgtaaagatcaaataagaaatgtaaacaaaaacatttctacattaaagtgatgtagatatattaatcatcagaagtagtactactgataacatcaagacaccatatctcacttatgaccaaaatgtcttcctctgaaataaaaggccaaagaatatttcagcattctgtctactaaatttcttctaccacctctaaaattcttaaacactgtagttaaagcaactgttgaagaacttcaacaggtaagaagaatgacatataaattggctgtgctgcaaacaagtttaactcacataaggaaaaaatatttacatgtcgttcatttttacaactgtgatcctgattgtatgataaattttatacttttatgttggcaacttttatacttttatgttgacagtttgttataaaaggtggaataattgaatgctaatggagaagttgtctaaaaattattcttaattttcaaaagtatttccaaatttcacgaatggtctcttgtgtcttgagagcatctttactatttataatttttttcacttaaaattattttattttttatttaaaataaattagtaatcattgstattaagtagggtttctaattaaacaacttttaattttattatatgaaagaaaattgagctttcaagaaagacaactttgctttttgtgatgtctactaaaagaacatagctcctacgtagactgagaaagcactaagtggtacagcaatagttaatgacatttatctctgcagaaagtctgcatttagcatggtgagggatttggatttatcagtgaatctctatgggtaaaaagcaatttctgtatggcacatctaatatttatagcatatgagttggcacaaaagttctatgaaatcatcttgaaaaatctattgattgattcatgcatccctgatataaattttttactccagtaaacacacatcattcttcccctttataacttttagataggaagaagactagaagtccagttgtgtgtttgtgtatatgtgtgtgtgtacataaatatatacatattcatgtaactaatgtcgcttcttacttgattatagaaagggtatttcaggagaaatgaaaatatatggaaacaaccagatcccaccattcttctgtcccgctttcccactatcctttccccaagacacacacacacacacacgcacacacacacacacatttaccttaatttcatttaattaaagaagttactgaatgattcctggcccttacctagtgatggagttcaggatatgttacccaaaaatggcatttgagaaaacagcagaggcaggaaattcactctcgctttccctttgcctttctcccctgaagcatgttataaaacctaagaaggatttttaaattttcccctgaagcaagtcaaaagaccctcatatgagaggtgccaccctatacccagaggaaagggatgtccttgtgtctgaagacatagggatacaaaaagaatctgaacaaattgaccttgctgtgtttccctcagtttattatcattagatcataccctttgccctccaatcatgtttctccatgactatttattcttcatcaaacctactatgaaacatacacagtttaactgtttcttcaggtcttcctttccttataaaggctgccatgtgaagtacaacttacattaaataaatgtgtatccttttctcttgttaatctgtcttttgttgttaggctttcagccatgagcctaggaggggacaggaaaatatttttcctccctttcacccagtcatatataagcaatttgcattaaatatttgtcagttgctttaatttttttagtccttakaaatgatgaaaaatagaactcacagaagggtttgaaaagagtttagaactagtaagttttaaaaatttttcccagctaatttaaacaggtttttaactcattcaaaacgctctgtttatacctcattattgtacaatgtttatttttaatatacatataattatatatgaaaaattaaaattatatataatttatattatagatttggggcatacaagcccagttttgttacgtggagatatatatatatatatttttttttcttttttttttttttttttgagacagagtctcactctgtcagccaggctggagtggagtggcatgatcttggctaactgcaacctctgcctcccgggttcaagcgattctcctgcctcggcttcctgagtagctgggattacaagcatgcgtcaccacgcccggctaatttttgtatttttagtagagatggggtttcaccatgttggccaggccggtctcaaactcctgacctcaggtaatctgctcaccttggcctcccaaagtgctgggattacaggcttgagccaccgcaccgggcatgtggatatattatcaaatggtgaagtctgtgttttagtgtaaacatcacccaaatggtgatgttttctgtattaacatcacccaaattaccattaggtaattttttcatccctcacctccccccattctcccttcataacattttgctaatggaaccattttgtaaggtggtattatattaattttgtaaatatcaataaccgtgaaataacatctgaatcagttgttcaataagcacccrctaacgttcacaaatgcttcatgtgacctttagagaaaaaagcagaggcaagctaattgcaaaatgatgaacactttcaatattcaacacacttcgaatgtagaccgagtttggcatatttgatttacaggcttcatacaaaactacccatattaataaaatattgcccactgtgcaatgcagacagtccttttatctgtgtacctacaataaaaaggtagcactgccaggcagctagttgtgttgtttcagtttccagattaatagccaatctacttggaagttaattcttcatttacactggggtgcatgtattgtctatttctggtggaatgggttttgctctgatcaataagtgtatcagcctagttgttcatcttgttggagaggtcaaaacaatgacagaggtacatctgtttttatgtcaaataatgtctgaggtaatgaatcctctccaaggaactaaacaatgttcttgcaattgtccttcggtctcccgctatgggcttgatcatgattaatctgaagcacttggggaattgaaagtgttggcacttcctaaaacatttttaatctaaaatttatattcatctacgtggtattttcagctcttgaatagtgacccaatgcataatatatatctaagatgaggcttatataaatgcatttgcatatgtgggaaaatgtagcagaaatattgttctaaaacgcagccagcaaaaattgctttcagttacctacataacaataaaatgtatttgcaagagtaaatgttatacttattgtgctaataattaataaaaatgcataatgaatacaaaatacatgtaaatgcatattaacctatatattacattaacacttggtgaatgaaatcccaatatttccacttaagtgacaaaatgagggccactacaagtttataggaaagtaaaacatgaagagatgtttaggcaaatacaaaaagtttctacaagaaagttattttgaaagaaaaaatatgaaggtgacatactgattgatggatagggcaggttgtttctgggtggattaagttattgtatttcatcaagcctatttcctataacagaattggatgtgatagatagattcagccactctgatttgtaggcacttgctgaattgctaccattcatgttagctcccactttggcattgattgaccatgtagtcctgtcactcgaagcaaatctcttaagtcttgtagtcatcagtgtctagattggtaaaatatggaaaataactcctcaccaaaccaccatccttggggatggtgcactcttcaggctatgggacaaagtgcagtcttgcaaatggacttgggactcaattagcagaataattagcaacaagtgaaagtggaccggccatcagtgtctgtgaggactataatgagctaactgcaataatccagaactgtccttacccctttccatgactttgggattttatgctctagtaaaatcacaaaactttaggcaaacattattttcaatttatttttcaacttaagacttaaatattaaacacttaatacaagcattatttcacaaagtaaggggcgtttcaacctcaaaaatgggaaggacatcacaactaatatatacatatatattacccttatatataataatatatgctaatataatatataatatgtattatatatgcaaatatattaaatattaaatatataataaataaatatataaaaataatacatacttatatatatyataataatatatagctatatatatagcattggtgtatatacatatatgtataacaatgatttttcactatagttttctgaattgtcttattacagaaaacttgatcatttactggacccagaggatagataggcatttgcagggcatcatttcagaacactagcaaggcgctgcagtagagattctggtgttggccagactgtgggggtccaggaaaacaggccagaatgcagtgtccaaggtccaaagtaggcatcagtgcctcagtttcaagcctggggctcgtagacagcctctgatcctgagagaagcaccctggccttagagaaaataggagctggccatgttactgaggtcagcctcagatttgaaggacaatatattgaagccaaatctgtaggtcaaaggttaaatgtcttagtaataataatgtatcccagctaataaactggcataagaggaggaataaaagagaagcttaaccctgagtcaccttggtttctcttaaagattagtaatactctttaaattactggaaatggaaagagccttgattttcatcatgtggccagagctgaagctttatgtagtagtcatattattcccagctaagcagacagggatttttgtggtcagggctccttgcagctcattacattgatgggtgacgtgggtgatccacatcatgggaagtctttctatattctttttcttcgttgtctagaaaaatgtgatgaaatatttacaaataattttgtgtaatggttttagaactgtttatgaatcatgaaaaggagtcagagaatcagtagctcagctcttaatcttgagggaaaactaggtagcattattatcataattcatctgcagaccagtcctctttcatttgccaacaatcacttctgacttactggagaggtaatcaagcatgaagtttataaacagtacaacagatagaccacaatttttcagacatatctatagctatagtattgggtttcattaatgttatatttcattaagtcacataactaaaattaaaatttttcaacatcctcaaccatttttaaaatgtccaaattttgctgaagcagcctttaactcaggcagtgacaaactatagcccacaggccacatctggcttactgtctcagtttgtatgactctcaagctaagaatgctttttataaatgaacatttgcaaccagtttaatgatagggaacactaactttgaatattatttatggaaaatatcatgcctccaaaaacaaatttaagtcttttcattagttgaccaatattacaaaaaatcatactgaaatattgtatttttaattttgtcaataaaaattgtgaaaatgttttctttcatcatatgaaaaactatataatatcctcaagttttccttttgtccacaaagcctgaaaccgttgccatctggatttacagaaaaacttaacccctgttataaatcatcaaagaaagtttatcttctgctcattatatatttagatacaggataatttatttttagtctttaaaataatatttggtatatatggaaaatttgattaatcaatatttctatacataagaacatcaatgataaaggcacttgaatttgatggattctgtcccacctaataagtagaaacacatctacattgatgaaaaaaattttatgtcaaaatctaaaataaattaacataagaaaactcagcaaaataaagtaaattctggatactgtgctaaatatatttgttggtattttaaataatataaaatgattaaaaatgagataatgcataaggattatagagtgagaagatgaaatatatcacatcaaaatgaaaatatattatatttaaaaagaaaaaatttataaatgctctcaaaagaataaaaataaataaaagcaataagatccatagaaaagaaaagctttttgtcaaaatatgatgcataatttttttaatttatccactaataggtgcactaatccattaatagatataaagtgatgtaaaatgttacaaaacagccaatagatcaaaattattaaaggtaccttgccaagaattaaagatgaaaaaaataatgcttcttgtcttttaagtactatgtatctatgctgcatatctcatttctaaaaagaatttagtgacatgaagaaaaatattgagtgacatgaggataatcatattgagaacccaatgactaaaactaactctagtaattaaaatatatatacaaacatatatatatacaaacactcttcccaaaggcaagaccaaatcaagaccacaaacctatctttgagctagaattacaaaattatatatcaaataaaaggactgtgccctgttatttctttcttttaaataagtggctatatgctcattgcacattataagtaaactattaagatgggaatatataaataaaatttgatgttcttattaattaaaattttaaagatgccaagatagacaaatgtcacctactttatattattttgcctagttatactgatatttcattccccttcctggtctaagaaactgcagggataagatggttaagtgcattaagagggttaaagccaatgacaggctcactgccagtaggtggcaaagcctagattctaatttagccttgcttgaaattgtagggctagaaggtgaactattcatcatcgttccttgttttgaagttgaagaacctaatatataagaagcagtaatttttccaagattgcctatattataatttggtcatgctctgataaataatcctaaaatgtagaaatatacrtatggtatacctagaaattttcatattaaacttttattctaatgtgtatcttcacataatttttctatgccagtatgattaattagtgagttaataacattaatctcatttcaatagagaataatattttaatgtcataagaaatttatttcagtattgctactggaccattacctgataagagttgtccaaaaccagacatagagttctccttcctaagctttttctttcatatttaacaatccttgtaagctttttaaaccatatccaaaaattcaactatgaactttataaaaggttggtaactttaatatttctccctcactcattcctgtcaattctctacagaggtcaaacacgtatatatgcttttttaataaaaacgtccttttgaattctttaacagtaaaactcaacatatcctaaatgaaacccatttttcaaccactaatacctgtaccccaaacctgtctatctgcttgtagctacaaccactgatttaggctgttttctgctgctataaaagactacctgagactggagtaatttagaggtttatttggcacatgattctggaggctgagaagtctaaaagcatgttactgacatctgtcaatggccttcgtgctgatttactccatggcagaaggtcaagaaagcttgtgtgaagacagcttgcttttataacaaaccactctggcaatagctaacccattctcacaaaaattaatccactcctgccataagagcattaatccattaatgagggcacagccctcatgatctatcaccacttaaaggtcccacttgttaatagcatcacaatggaagttaaaattcaacaagagttttggaggggacatggaaaccaaagcattccatccctggccccctaaaactcatgtccttctcacacgcaaaatacattcattctatcccaatagcctccaaagtcttaatttattccagcatcaactcaatagttcaaartccagtgtctcatctgaatcagacatgggtgagactcaaggcacaattcatcatgatgcaaactcactctgactatgagcatatgaactcaaaacaagttatctacctctagaatacaatggtgatacagatataggatagacattcctattccaaaaggaaaaaatgggtaacaataaaggggttacttttcccaagtaagtccaaaattcaacrgggtaaaaacagtaagtcttaaaatgctagaataacctcctttgactccatgtctcagatcctgggcacactggtgtgggggttggactcccaaggcctcaggcagccccatccctatagctttgcaaggtgcaggtcatgtggctgctctcatgggtgggaggtgggtgcctgaagctttccaacgctggtagatctacagttctggggtatcgatcatgatcccacttcccatgcaatatctcaatcacagtcccagttctcatgcactaccctagtagggactcactgcagtgcctccacccctgcaacaagtgtctgcctgggtccccaggctgttggatacattctttgaagtctaggtggagatcactatgcctccagagtgcttgcattctgtaagcctgcagaattagcaccatgtggatgctgccaagcttaaggctgttccatagcagtatcccaagctactccgggcctgcttgagccacagttggggtggctgaggagcactgcaccagaatgcagggaacagagttcagaggcagctctaggcagcaagattttggaaggtgctccaggtccttccccagaaaccattctgccctcctagagctctgggcttatgatgggaggggcagccatgaagatctcaaattttagattttcccccattttcctgataaagagcatctggttctcttctattggtactaatctctcctaaagatgccttttcactccttacatgaccaagatgcaatgtttttaaatctttttcctctgcttcccttccaattataaattttatctttaaatcattcctttctcctctgatcttactgtaagtagccaaaaatagccacatgattccctcattattttgttctgaaaattcctctgccagatatcctagttcatcatccttaaattccaccttatattaagcccctgagcatggacacaatgcaaccaagttctttgccacaatttagcaaggataatctttactccagttttcaatttcttgttcttcaattctgtctgagacctcatcagaatagacttcactgccagtatttctatcagcattctgattgcttcctcttagataataactaagaagctccagactttccttacagcttttttatgagctttcactagaattgcccttaatgctctgtttattgcaagctgtcctttctctagccttctcctcaaagttcttgcagcctgcaccccttatctagttttaaagtcattttcatgttttcagataaaattttttttttttgagaaggagtcttgctccgtcaccaggctggagtgcagtggcgtaatcttggctcactgcaacctctgcctcccgggttcaagtgattctcctgcctcagcctcctgagtagctgggactacaggtacaagccaccacacccagctaatttttgtatttttagtagagacggagtttcaccatgttggccaggatggtctcaatctcttgacctcatgatctgcccccctcagcctcccaaagttctgggattacargtatgagccaccgcgcccagccagataattgttatagccagcaccacacttcttagtatcaattttcttagtcggttttctgttgctgtaacagaatacttgagattaggtattttaatttttattttttaaaaggggtttatttggtttgtgattctatgggggtgggaagcccaggagcatagcaccatcatctggtaagggcctccttgctgcatcattccatggcagaagggcaagagagctcctgtgagagaatgctcactttcataacaatccactcaggcaataactaatccactcctgagataacagcactggcggaggcttcataatctaatcaccttctcaaactcccatctcttaatattgtcacaatggcaattaaatttcaacatgagttttagagggggacattcaagccatagcaaccaccatcccatgacgtacccaaatctgaagccagtagtcagtttagatattgacttctccatcatatttcatcttcattcaatcattgtacttctaaactatttttctttatcatcccaaatctttatcctcatgaaaagcattttattttagagcttcaacattttaaaaatctgttgcaatagcctcctatcaccctaattttggactctttacactggaatttcttctccacaccactttcagaataaacacacacacacacacacacacacacmcacacacatatacacaatctgacttaggacacttgacacttgtctatttaaaactctttaatatagctcagtatctgcagaataaagtttagatttctaagcatggtaacaagctctccatgatctgccttccttccttctataatcattaccttttccttaccacatattctaatctttaggtaccttgttctttatacattaatttagttatgttaccttttgctactgtctttttttaacttagaattcctttatatctycttctctctttacttgytctttacatctagatgttctccatgaagcatttctggatctgtctgtcccgtctccatgtaaagttaattaccgcttcttttacactttcataacacttgatagaatgtgcagagtgttttattacaaattttatttttctgaatccctactaaattgtgcatagctagatgtcaaaggctgagcaatgctcatctttttatcctcaacacctaagacaaagcttattacttagtagtggctcaaatatattgcaaaactaatacataagaatgaataagaatggatgaaaacaatctcacttgtttgccaaaaaaaaaaatcatgtcctaacttctaatcatagcatcaaattctttcaccatataacctaaacctactctagagaagaattgtgtctcctttgacaaaatgccctactaaactcatgctatgaacaaaccatgtaaacaatatatctatattgagtgcaatatatgtctctaattaacttatgtttagaaacttcaacaatgaatatgatatgtgtattatgtaagaaagaatattttgcatttgtaaacacttctactattatagtactcttctgtataaattaatttgatatgttttaaaagctttrtatttggcaaaactatattatctctatcttgtaaaaaatgaaactgagcttcattaaattgccaaaataattattcaaggtcacaaagtaagagatgaaccrggatgccacatatgaattctgtttcccaatgcaatcatatgcagaaaaacaaaaaggggaaaatacataacaacgtaatctgtattttgccacctcctatttataaatgtatatgaagaaatatgaaaatagattcatttctagttgtgtgtttagctactggaaagttccagcactgaaaagttgaaggagatgacaaaggtaattacattgcttgtatacagtcctttcattttaaattyttcttgaacttagcgctactgaaatttttccattgagcaacctcttgtgactgtttacccccttagctgtcaagattatatcctaatataagggagaaattttgtatcttaaaataaattttctctaaraataagcacagtgaaatgcagccatcaagttcactctgtcccgaggagtcctcaatgaatatgtatctccctgacatcctagcagagcaagggttgaggtcttttctggcaaactgacagttgctcaactgaggacaggaaggggaaaaggagtagctgaatctctgattgatatcttttaagcagacagtgttcttctactgagtttaacctcttcaagagaagatacttcctaaagtatcagggcctttctttcacaatatctatgtgttaaagaaaatacctaaaatgacaggcatttttctattttatttaaaagccatggcatttgaatttgcagatgatggctagaacatttgtacttttcaataaaaacagttttaaaatattctagccagcatagagtttaggtagaacagatatacaattttttacctaaacctcagtaacctagaaatggctcctactcaatgatggaagaatcaaacccattctcttagaatttatcaatattaattcaatccatttattcttgaaagaaaattattcatcttctgtgtgtcaatcattataataggcacaaatatcatatccaggccaaaatgagtaatgtgagggagaactttctgaaagatccagtgtttttgcacatctctaaaagagaagacaaaaaattggttcaagcagaagaactagtatgtgactaaaggcaagagaataattggtacctgtgtaaataactataaaaagtttggtaataccagaactaagtgacaatcagcagagatggagaaaaggaagctgattgtaaagaggtggaaccaataggattcagtgattatgtgttggcagtaaatcagagacatatgatgtttagctttctgayttgggtgactggctgaataatggtgctatttcgtgcatggaaaaacacagtgggtggaggttcaggagaargaggaaacatgactggggaataaggaactaagaactatctatgaaatactgagtggagatatcaaaaaaaggcagtaagcatatatattcagagaaatgttgggacactgcctagtaaagcagtgagaagagggccaccatcctccagaccccagaatggtagatccactgacagcttgcactgtgtgtctggaaaagccacaggcactcaacaaccagccattgaaaacagctgtgggggcctgaccctgaggagccacaggggcggagctgcccaaggccttgggaacccaccccttgcatcagtgtggcctggatgtgagacatggagtcaaaggagattatttaggagctttaaaatttgactgccctgctggatttcagacttgcatagggcctgaagcccctttgttttggaggatttgtcccttttggaatgggagtatttgggcaatgcttatactgccattatatcttggtgtaactaatttgtttttgattttacaggttcataggtggaagggacttgccttagctagtatgagactttggacttggaattttgagttaatgctgcaatgagttaagactttgggggactgttgggaaagcataattatgttttgaaatgcgaggagaacatgagatttgggaggggccaggggtgaaatgatatggtttggctgtgtgtccccatccaaatctcatctcaagttgtgaccctcagtgttggaggaggggcccggtgggaggtgattagctcatggggatggacttccccctctcttgatagtgagtgagttctcatgagatctggtggtttacaagtgcgtggcacttccccttttgctctctcttcctcctgctccagcaatgaaggacctgctggcttccactttgtcttctaccatgattgccagtttcctgagggtccccccaccagccatgcttcctgtacaggctgtggaactgtgagccaattaaaccttttttctttatgaattacccagtctccagtaattttctttgtaaatttcccagtgtatttatagcaatggaagaacgggctaatacaaaattctgcttttcaatatattttttaatttgcttttttttcaaacatttgctataaatatatgttcttagcttaaaaagtctaaatttttatgccaaacagtagtgtcctgtctcacctctacctgttttctggtttcattctcagaaacaaattcctctaactctgaagcttcttctcttagtcatgttcatatccttaagagcacactataaccatttttttcttttttttttttttgctttttccaggtttaggtcttattatttacttcctattatggaaggtgagattgacctctttcgcattttcccaaaccctcttctaaatagagttacatcacaattttaattggaaaaataaccagggtttttattactatagctatgtaaatactatttacagataagccatatcatagctatgcttgtatttcctttcttgtacaactctttgttctctatggagtaaattagtgccaaatttttaatttgctaagtttcctatatatctatctctaattcctctttaactatctgccagaagagtaaatattttctcgatattttcacacttcagataaatctgaaagtttttgtttttcttgttgctatcactgtgggaatcctccatcttcctgcttcaactcggactgctgttctctggcctgcctgctgcagctgtcatcctgggaatttcactaaagcttcatttcagggaattatgcttctttactacccctttttcttatacccctgttatggactgaattgtgctcccccaaaattcatattttgaaaccctaattgccagtacctcagaatgtgaccaaatttaaagaatgggcctttaaagaggtaattaaattaaaatgaagtcattaatgtatgcccaaatccaatctgactagggtccttctaagaagaggagattaagacacacagagagaaaccaggggcagtatgcaaagaaggaccacctcatgaagacatagcaagtgcgcagccatccgtaacccaaggagcaaggcctcagaggaaaccaactctgcccacaccttgaccttggacttctaggctctggcatataaaaaatatattccttacaagtcattctattataaagatatatgcatgcatatgttcattgcagcactattcacaatagcaaagatatggaatcaacccaaatgcccatcaatgttagactggataaagaaaatatggtacatacacaccatggaatactatccagccataaaaaggaatgaaatcatgtcctttgcagggacgtggatggagcttaaagccattatcttcagcaaactaacgcaggaacagaaaaccaaacaccgcattatctcacttgtaagtggtagctgaacgatgagaacacatggacacagggaggggaacacaaagacacactggggcatgtaggtggggagtggggggaaggggagcatcaggatacgtagttaatgcatccatgacttaatacctaggtgatgggttgataggtgcagcaaaccaccatgacacacgtttacccatgtaacaaacctgtatgtcctgcacaggtattccagaacttagaagtttaaaacttttctcttaaaaaaaaagacaaatttttaaaatttaacaaaaaagaaaagcaaatatattcctgtagtttaagccacccaatctgtcatagatttttagggcagccccagaaaatgaatatgactccgtttattgttcttgcttccctgcctccccacctcaccatttttttggcagagcatattctccagatgttttctgaaaaagaggaattaaagaatatttgggaggggttgaatatctgaaaatacctttatggaaaattgtctggatatagaattctagggggatatttcctatcatcctgcctatcctctctcctactatgttttacactgtatagccattatttcagtagtcacccacagacataacttacatttgaggataatcactaccatttccctttccatatggtactttaaccacactccttttaaacttatgttattgtcatcacataattgtatccttttaattcattaggacattattttattattgtatactgtctatgtgttcaaatcaccagcatatttcctgtaccttctttttcatttcttcttcatgccaaaaccttttatgaaacggggccgtttatcttctgcctatagacaatgcttgaagcttaagattcatcaagtctgcaaatttatatattttatgaaatgggaggaaattttggtcattattttttcaatttttttcctactttatcttctttcccttgtcctctgggactccagtcccaggtattgttctgcaggtccctgaggttctgttcttttaaaatattttttccttggctactcctaatttctattgatctgtcttcaagttaactgatcctttactttggtcatctccagtctgtcattaacttatccggtgagttttaaatttcagatactgtgttttcaatgctggaatttctttttgtttgttttacagaaattatatatatgttttttttgtgtgtgtgttttgtatttttttgggacagagtcccaaaaaaatctgtctgtctgtcacccaggctgtagtgcagtggcatgatcttggctcactgcaacctccacctcctggcttcaagtgattcttgtgcctaagcctcttgagtagctgggactgcaggtgctcaccaccatgccaggctaattttttctgtatttttagtagagatgggatttcgccatgttggccaggctggtcttgaactcctgacctcaggtgatctgcccgcctcggcctctaagtgttaggattacaggcatgagccacctcacccagcctcattatttataatagtgatatagtaaataaaatttctttaaatcaaacaaaaagaaattccagcatatatatatatatatatatatatatatatatatatatatatatatatataaaaaacaaaaatataagagacaatttaaatattagcaaatatattagtgctagaatgttttggtttaatttgtagtttctttttttattttaattattattatactttaagttttagggtacatgtgcacaatgtgcaggttagttacatatgtatacatgtgccatgctggtgtgctgcacccattaactcgtcatttagcattaggtatatctcctaatgctatccctcccccctccccccaccccacaacagtccccagagtgtgatgttccccttcctgtgtccatgtgttctcattgttcaattcccacctatgagtgagaatatacggtgtttgattttttgttcttgcgatagtttactgagaatgatgatttccaatttcatccatgtccctacaaaggacatgaactcattcattttttatggctgcatagtattctgtggtgtatatgtgccacattttcttaatccagtctatcattgttggacatttgggttggttccaagtctttgctattgtgaatagtcccgcaataaacatacgtgtgcatgtgtctttatagcagcatgatttatagtcctttgggtatatacccagtaatgggatggctgggtcaaatggtatttctagttctagatccctgaggaatcgccacactgacttccacaatggttgaactagtttacagtcccaccaacagtgtaaaagtgttcctatttctccacatcctctccagcacctgttgtttcctgactttttaatgattgccattctaactggtgtgagatggtatctcattgtggttttgatttgcatttctctgatggccagtgatggtgagcattttttcatgttttttggctgcataaatgccttcttttgagaagtgtctgttcatatccttcacccactttttgatggggttgtttgtttttttcttgtaaatttgtttgagttcattgtagattctggatattagccctttgtcagatgactaggttgcaaaaattttctcccattttgtaggttgcctgttcactctgatggtagtttcttttgctgtgcagaagctctttagtttmattagatcccatttgtcaattttggcttttgttgccattgcttttggtgttttagacatgaagtctttgcccatacctatgtcctgaatggtaatgcctaggttttcttctagggtttttatggttttaggtctaacgtttaagtctttagtccatcttgaattaatgtttgtataaggtgtaaggaagggatccagtttcagctttctaratatggctagccagttttcccagcaccatttattaaataggaaatcctttccccattgcttgtttttctcaggtttgtcaaagatcagatagttgtagatatgcggcgttatttctgaaggctctgttctgttccattgatctatatctctgttttggtaccagtaccatgctgttttgattactgtagccttgcagtatagtttgaagtcaggtagcgtgatgcctccagctttgttcttttggcttaggattgacttggcaatgcgggctcttttttggttccatatgaactttaaagtagttttttccaattctgtgaagaaagtcattggtagcttgatggggatggcattgaatctataaattaccttgggcagtatggccattttcacgatattgattcttcctacccaygagcatggaatgttcttccatttctttgtatcctcttttatttcattgagcagtggtttgtagttctccttgaagaggtccttcacgttccttgtaagttggattcctaggtattttattccctttgaagcaattgttaatgggagttccctcatgatttggctctctgtttgtctgttgttggtgtataagaatgcttgtgatttttgtacattgattttgtatcccaagactttgctgaagttgcttatcagcttaaggagattttgggctgagacaatggggttttctaggtatacaaccatgccatttgcagacagggacaattagacttcctcttttcctaattgaatcccctttatttccttctcctgccwaattgccctggccagaacttccaacactatgttgaataggagtggtgagagagggcatccctgtcttgtgccagttttcaaagggaatgcttccagtttttgccyattcagtatgatattggctgtgggtttgtcatagatagctcttattattttgagatacgtcccatcaatacctaatttatggagagtttttagcatgaagagttgttgaattttgtcaaaggccttttctgcatctattgagataatcatgtggtttttggctttggttctgtttattactctgctgagatgtattcattttttattagtgtatgtctgttcttgtgcatagttataatagctacattaaaatccttttcctaacatctaacatctgtgtcatattatggttggtttccattgattgccttttctcttgcatatggatcatattttctgttttaccatttcttcatgtagctagtacttttaaatcatatcctcaacactgtaaataatgcatgattctgccatgtttctcaataaaatattgatctgttgttttagcatgtagtcaatttgattggacataaactccaaactaccttctatgaagttggtggccgttgaattcttattctagttcttctatacctagctagatttttatagtttatgccagacatacatttttcacaggtcagtggagtttgggtgcagattttatggacacaattttctgatttcagagctataggaagactgcagctttgcattcacatttcagctcaaggatggactaggcaagaagccattaataaatggaaacttacccagtgtcattttcttttgttaatgtatgcctgtgtttggccattctctagttcttttaagtaattaacttttacattttgccagaattcatagggcactttgggtgcaggtggagaaagacagacaggaggttttttgataaggtctaatctatcctcatggaaagaggaacctcaaattttctgttttcgttagcctgaaaaaaaaaagaaaaaaaagaaaaaacttcattcttgtactcaaaaatgatttccaatggattctaggcctacaggtattttcttacatcattttgaagaggtaatataactatcctctaacttatatttttacagttaagaagatagcttttagtttagctgccatcagggaagctgtcttgtatttcctggacacacacagctccccaatcccctccactcagagccaacccctctcctggtttctatcaactcagcttagttttctatcaactcagcttagttttgcctattctagaacttcatattaatggaatcatgcactatatgctctttttctctccggcttctttggcctaacagtgtgtttgagatttgtttatatgttccatgtgttagcagagtatacttttcttttcattgctaagcagtattccattctatgactatactacaaattgttcattcatttagctgttgatagacattttgaaagttggaacaattataaatcaaactgctatgaaaattcttgtgtattttgtttgattttttttacgtgttgtcatttctgttgggtaaatagctagagtagaactgccaacatttaagatcgatatatgctgaaatttgtaagaaactgcaggcrtgatggctcacgtttgtaatcccaacactttgggaggcttgaggccaggagtttgagatcagcctaggcaaaagagccagaccttatctctaaaagaatacaaaaattagccgggcatggtggcactctcctgtagtcccagatacttgggaggctgaggcaggaacattgctttagcctagaagcttgaggctgtagtgagctattaaagtgccatccaggagaatggcgtgaacctaggaggcagagcttgcagtgagccgagatcgcactgctgcactccagcctgtgcaacagagcgagactctgtctcaaaaaaaaaaaaaaaaaaaaaaaaaaaaaaaaaaaaaaagccatcatacttcagcctgcacgacagagtgagatcctatctgtaaaagaaaaagaaaaaaagaaagtgacaattttccaaagtgattgtgctatttgacacttctaccagcaatgtatgagagtttcaattattatactttcttatcaaatcttggtcgtaccaatttttgtgattttagcaattctcatgaagtttattccattattacttcactggagtggtagttttataggtgtacacattcctcaaaacatattaaacagtatgctcgaaatctgttttattgcatgtaaattatatgtcagtaaaaataaatctataatattaaaattattagaaaattttacctcttacagaaacagccatatctagatttcagagctatagaatgccatttttatcttgcaccggtttcaaagaaagctgaggtaataattaaataatcataatactgaacagtatgtggtatatggcaagcttttagtgattatttgtggaatgaatgaattaagttagtgtttcgttgttgttgtttttgttttttgagacagagtctcgctcttgttggccaggctggagtgcaatggtgtgatcttggctcactgcaacctccgcctcctgaattcaagcaactctcctgcctcagtctcttgagtagctgggactagaggcatatgcaccacgcctggctaatttttgtatttttagtagagacagggtttcgccatattggccaggctggtcttgaactcctgaccttaagtgatccactcacctgggcctcccaaagtgatgggattacaggcatgagccaccgcgcctagctgaatgaattattgttgaaaagtaataaaaaagaataaaatacaaaaggaaaataagataattatgtatctgcaagtgccgaagccaaaagcaactaaatataaacgtcctccagttacatatttgtccacaaggaaaaaaaaaaaaacgttggttatacaattgtatgacgtggtaatatttctgaatatttatgctgttacttttaacattgcagattctcttgattctagatatatcagatttaatccagggcagttcaaagttaagacagatttcttaaaagttaatggtataatggttgatcatattcatatttgtttagcaaggattattagaattttatatttcataaactttttatggacataaaatgtatacttctgtttaaatgaatactagggaaataaaaaagaaattcattcttcaggacattctgggcaaagtcaaactgacatttgtcatctttaccttttaggccatctcaaaatttagttcatcacattcaagaaaatattttaacaaccagctacaacctattgctactaatagaaaaaacaactcagtttgtaatactggtggtgaattattaatcgtcatgattatgaatatacggattatcttttttaaaaaaaactttacaaaaacaataattcatattaatggaattttttaaaaataggtacatctaagaagaggaatgtatctgttatgataggctatgttatgctacagtaaagaaccatgtcaaatctctatggcttaaaattgcaaaggtagccaggcacggtggctcacacctgtaatcccagcacttcgggaggcagaggcaggcagatcacaaggtcgagatcaagaccaacctggccaacatggtgaaacctcgtctactaataaatacagacaaaaaaaaaaaatagctggtcatggtggcgcatgcctgtcgtcccagcgacttgggaggctgaggcaggagaatcgcttgaacccaggacgcggaggttgcagtgagccgagatcacggcactgcactccagcctggcaatacagcgagactctgtctcaaaaacctgcaaaggtttaagttctcattcatgctctatttcagctacgggtcatttggggtctctacactgcattattttcctcctgggacacaaagtagcctccatctggaatactcttgtcatcatgaaagagggagagaaaggcaaataattggcttcaaaattttacccccccatgtaaaatgtatagtttcactagcatttcattggctaaaacaagctgcatagctaacgtgtaattcacaggaggacagtataattctaccatgtgctcaggaagagaactggaaatacttggtgaacagcattaataaaaactataaggaacaatatgaagaatgcaagaaaaatcagaataacaagaacttagcattgaatttgagataactgatgaaaacatttccttagctaaataagtttctaataaactgttaactgcaaaatataggagcaatgacaaatttctacattttctccttaatctagttttttcattaccattcacagtgaatcaaactttgattttttttttaaataagaaatgcacaatagaatattctcaacctacagcaggacagtgcctattttgaataagaaaccaatttaaaatgatgatggccttacctagggcaatctaggaatctaggccagatttggacaccaaggacaacctattttatcatagtttacccacattgcacaacagtaaccggaaaatatggcatcaagacctaaattgaatctattgtgctctctgaataggagatatctaacaatatggaaacagcataaggattattaaaacgatcacaaaggaggcagtggtgtagaggttattcttaacacatatattttggggatttctatattagcatattttctcacagatctttggaggtttattcacattcaaagtaccaaagacaaaggtgaatatcaatgtagctgtaataatccatgtgtacgctaaggggcgccagcacctaatgtttaacaccacatttttaggaagaaattctcaaacctcaagtaccctttattgtgacactaaatgggagccattattgtttagtaaatatttcccccaaaccaagattcatagcagttcttgagggcccagctgaaccatacaaaaaaattaatgtcttttattaatatcattaaagtgctttacgtaaattaactcacatagcaacatcttattaaaagtcaataaatttagacaactagcatcttattaaacgtcaataaatttattttattttattttattttgagacggagtctcgctctgtcgcccaggctggagtgcagtggcgggatctcggctcactgcaagctccgactcccgggttcaagccattctcctgcttcagcctcccgagtagctgggactacaggcgcccgccactacgcccggctaatttttgtatttttagtacagacggggtttcaccgtgttagccaggatggtctcgatctcctgacctcatgatccgcccgcctcggcctcccaaagtgctgggattacaggtatgagccaccgtgcccggccaaacgtcaataaatttagacaagaaattattaacctaaattttgaaaagattaaatgagataatgaaaatattttattattcttatatgttcaaggctttatcttgaacatataagccatatatattagcccaaataatcccatgtgtcttttccactctgtttaatatttccataaattaaaagtctgtttcaaagtcacatgaagaggcccagcgtggtggctcatgcatgaaatcccagcactttgggaggccgcggagggcggatcacccaaggtcaggagttcgagaccagcctggccaacatggcgaaaccccgtctctactaaaaatacaaaaattagccaggcatggtgacgtatgcctgtaatcccaactcctcgggaggctgaggcaggagaatcgcttgaaccctgaaaggcatagtttgcagtgagccgagattgcgccattgyactccagtccaggcaacaaaagaatgaaactctgtctcaaaaaaacaaaacaaaacaaaattcacatcaagagatttttctgtaagagagagtagctatcacctgagatctgtctggagctctcttaactctcttccactactaccacttgtagtccccgtaataagcttccaaaaatgccagatcttggggactatcacagttcactacactcgagggaaagaattttacctataatgatactgttactctaagcagggaagaaggactttatagaatcatataatacattcataaataaaaagtatttaataacgtccatagatggcaagtgctagccttgttcactgtcattttaaatgttatttcatgtaatcctcacaataagtctaagaggcagatgttgttgtttctgttttgaaagtaaagtttacaaagattaggtaaacttgccctgagtcatagagccagtaggtgctgagccagaattttaattaaaatctgtttgatcccagttttctacttctgatatgtaattcccacattatttgttgccaaactggtatactaagaaagatttttctacatttatgtctatatttatagtggtaataatcttaccaaatcagtttttctttagaaatggtacaaaagcacattgctgcagaggaaaccttttaaaagttagatttgctctgaatttatgtgagatttctttaaactgataacgattagatgctatcgtataacgacatcgtctctttaaaaagagcctgttgcccaggcttaaattcagtggggttatcataggttacagtagcctcgaactcctgggctcaagaaatccttctgcctgagcttcccaagtagctgggactataggcacatgccaccatgcccagctaatttattttactttattttattttattttattttattttattttattttattatttgtagagacagggtctcgccacattgccccaaccagtttcaaatttgatcattagagcaataaaattatactaatgataatgttgatcataatgaagatgacaactggtacacattgagtctacaaaaggtatgggcatrtaatattcaaaagagaagttataaagtttgtggaaacagaatggtcaaacaaaactaaggtaaataagacatgactagcttttacattcattataatatgtagtttagtggaccattcatttttatgtgtatagtgcttttatatatcggttttagaaatacacatataaatatgtttcaatctgtttaatgcaagcctaaatctaaagaacaatgagtaaatcaaatagtgcatgggaaatagtcactacaccaagaacaggaagaactaatactggtggtcacaaaaagtaaccaactataaggagagtcaagaaagtgatgatgggtagaaaggtattgtgtattaataaataatgatcattagtagtataaagttcttactaataccataatagtggcaaattactatgttctcatgctttatgcatgctaatgcattcaatccttctaataactgtgtgagttagattttgttattattctcatttcacaaatgaaaactgagacacagaggttgtataatgtgctcatgatcacacaattaacaggatgcacagctgggatttaactctaggtagtttggctctagggacagtgcacctgaccactatactaccaaacattctacagcaacagtccccaacatttttggcaccagggactggtttctgagaagataattttttcatggagcagggttgggatgggggatattttcaggatgattcaagtgcattacacttattgtgcactttatttgtattattattacattataatatacaatgaaataattatacaactcaccataatgtagaatcagtggaagccctgagcttgttttcctgcaacttgacagttccatctggggttgacgggagacaatgacagatcatcaggcattagattctcataaggagtgcacaacctggatcccttgcgtgcacaattcacaatagggtttgtgctgctctaggaatctaatgctgctgctgatctggtgggaggtggagctcaggcggtaatgccagtgatgaggagcggctgtaaatactgatgaagcttcactcgcttgccccctgctcaccttctactgtgtaccccgattcctaacaggccacataccggtatgagttcatggcctggaggttggggacccctgttctacaggtatcttcctttgagcctctctactcagattccttcctgatttcccagaaggtcaaacctttgatgatcctatgaattgaaatcctctaaggaattataactacatgccatacactggccaaataagactttcaaaaaatcattttggggggaaagataccaggctcaaaattataaaacatatgaaaggtgtggacttaaaaatccatattgacagaactagccaaaatttggctagtaaaaggaagttacatgatgattagtgcctagattttgaatacccttgggagacgcaaccaagaattgattggctatttttttcataattctattgagatataattcaccaatttaaagtatacatttcaatggttttccrtatgttcacaaaattgtgcaatcatcaccacaaactcattcttgtcactccaaaataatctactgatcttatgctaagtctctacaacctcagagagtctgagaaagtattatttgtgtgatgcggctctgcatgcatcactgaaatcatcagaagaaatcaagatgatatcactgaatccctaagaggttttcaaaataagagtggcaatgataccagaaaaatacaaaaacagtactggaaaaagtaagaaatgtaataagcccattgtgctgatttttaaagaagaggcatatacatatacttaataagttttacaaatcatttttgtttatctactgtctaaggggtttgaagacttaatcatagcaacttataattgtttaatgaatacaatcaaatttaaaataaatgtttagatgctcaagaaaaaaatattttttataattttatttcagagcaataaatgtagtattaaaactgtacaaataacactgtatactcctttttacaaactccccccaataccttaaaatttctatgaacatttgcaatctcatgaggaacattgtcatgaaggcatcattttataaagtgtatgtggagtgcctattttcgggttctcctaattcaggcacctgtctataacattacgtaaaagaagttgctcttgaatgtttagttatccaaaaggaatttactaaaagtgactgaaggactctataagatgaaaaacacttaatcatttaagcagttaacataagcagtgtgtgtgtgtgtttatgtgtgtaaatacagatgaagcaaaccagaaatatatcatagtatggttacagtattaatttatgaaaggtttgtactgagggttcagtgaaaacacatagcccttcrtgatattcctactcagatttcaaccttctttcatcttttagctctgcaccacctactggcctcttctaagtcccaggaggatcatctgctctgtctgcataagaatacttgctttttatgccatggcatttactgtcagttggagagacaattgcttgcagtctggacggtgtattcagaatttttgtctgttttatctctagctatgcataggtctcwgcgctgccagaatttaagtaagcttgcattccttcaataaggaccataagctttctatagctgtttattgtcaaggaaactgtatatattctgtacatagttttttttagccctgcaaacacttacttctgctttgtcctctatggaattaaagagtgtttcatacaataccggggttttagtagaaaaatggcagctcctgggaatacatagatttgtatttatatagtakgtaatgtgtttcaggcactgttctaartgcattgcaaacaatgattcattttatctttctgatagcccaaaaaggaaagcattatcattatctccattttataacttagagagctgggggatgtagagaaattaaagaaataaaagtctgcactggagctagattttcacagaagttattaagatttaattggtsagaaaaatctcctgagtggagatgcataatcagatcaatcctaaggagtcacatttacaaggacattatccactatgacagcatctctagtgtaacaatggatcttttgtgacttgcccaaagtcacatagccagtaaatgacagagatggcatttgatcccagcagtctctctccaaagcccatgcacttaatataacatggagagagtgcctcttttcctaggaatcattgaactttatgatccttattacctagaacaattagccccctagtctcactgcccaggttcccaaatgcccattatacttgtagtctattccatgcccgtgtctatgtatgctttattatcccactcatttgcagttacatgagtttaaactcaataaatacttgatgatggagatagggattaatattgcactagaggggataaacgttgttgtaattaaaatctgcagaaaatatgtggtgagtctactttctacatcaatactctgccgagttacatagtactagggtttgtgcaaatctaggaaacaaaaccagtcagtaaaagacacctgttccgggccgggtgcagtggctcatgcctgtaatcccagcactttgggaggccgaggtgggcagatcatgatgttaggagatcgagaccatcctggctaacatggtgaaaccccatctctactaaaaataccaaaaaaaattagccgggcgtggtggcaggtgcctgtagtcccagccactcgggaggctgaggtaggagaatggtgtgaacctgggagacggagcttgcagtgagccgagatcgcgccattgcactccagtctgggcgacagagccagagtctgtctcaaaaaataaataaataaataaataaataaagacacctgttccctttgtagcaagttatacttgctggggtttgacaaaatcttttggatcaaagttttttaaaaagtaaatgttgtaataagcatttctctctagaatacttaatagatgatgactcattttaaactattgcattctgactgacctttggtggtgctgaaacaacattctcacataggttattgggatttaagtggtgaaacaatttcctgagtagaaacgtcacaatcagatcaacctaagaagtcacatttaagaggacattattcagcaggaacatttctctagtttgtcaggattaatattatgtaaagaataaattgatgtatttttacttccttcattaaaaaaaggttctatctgtggtctcccatctctaaagccaggctgaaggactgtcactcaagagcaatggggctggagaaatgggtaaaaatgtatcttctggccaggcatggtagctcacrcctgtaatcctagcactttgggaggctgaggcgggtggatcgcttgaggtcaggagttcaagaccagcctggccaacatgacgaaacctcgtctgtacaaaatatacaaaaattagcaggcgaggtgkcgggcgcctgtaatcccagctactcgagcgactgaggcaggagaatcccttgaacccgggaagcggaggttgcagtgagctgacatcgcgcctctgcattccagcctgggtgacagagcgagactctgtctccaaaaaaaaaaaaaaaaaatcttcttttccaagatagtagtctgcctggttttttaataaggtggtttactaaataagtcagaagatccagcaccaaggattcctccacagtcctctcccaatacctcaggcacacagccgactgctctgtgttataggagattctttcagggaagagtaataatgtctgtctcttctgcttctgggcttctggggaatcgtgggaggaggaaggaaacagcaggctaaaggaggaagttcaggtatgttttcacctccccttacatagattccaactgcgaacaggtgcaccagataaagtgagggaaacccaaagtgcaatgggtgttactgcgtataacctctgtccaaaaagcctgaacagaccgcaaagagtccatgctgcagaggtgagaaatgaccatcctctcaaagatcaagactttgctgaagaagccgcagctccccatcaggatcccacggatcactgcaattgcttaaaaactaacaagttgcattagtatagcacgtacaggtcagagggcttttctgacctccctatttaaaagctcccctcatccactgctcattccacttccaacaatggtgggcatcacatggcaactaactccacgagaggtagctgggatgctgtgccactgtgcagaactcttggctgccccacagggctggggaggaaaaattggagttcaaaacttgagacttttttcccagaacctgaaagcgctcctagtctttcagtagtagtggaatgaaaacagactagccgtcactggattataatcagagcctcaaattatttaaaccactcctcatatgtaatctggcattcaatccaaaataatcctgcatttaggaaggtagaacttgacagaaaacatgaggaaaaaaatggacactagaagcaactctccccaccacgtataaaagctcactttctatcacctttatctactttatttctattatcacctttcaattacatatttatgtatttgctttatgatctgtctcactcattacaatgaaagtttcattaagaaataagaaataggttttctttttctttttctttcttcttcttctttcttttttttttcttgagacagagtctgattctgtcacccaagctggagtgcagtggtgcgatctcagttcgctgcaacctccacctcctggattcgacaaattctcctccctcagcctcccaagcagctgggacagcagatgtgcgccaccatgcctggctaatttttgcatttttagtagagakagagtttcaccatgtttaccaggctggtcttgaactcctgacctcaaatgatacacctgcctcggcctcccaaagtgctgggattacagggcgtgagccatgcacctggctcaagacatggatatgtctttttatttattcactgttatatttgcagtatttagaaaagtgtctgacacataggtgctcaagaaaccttgtttaatcaaagaatgatcaaattaacttaccaaatagttgctatgacagtttagatatggagatatttcttcaggttgatgatgtaaaaacttcacagatgatattgaggaaaggaaaggctatcttagatgaaaacatgagaagaaaaagagcagaaagccgtggagaagaaggagcacatatatatagaatttaggacacaagcacagtaaatccatttgtcttcaatgtttattagtgttggaaaatgaaaaatacatgttacagactaggaaaaatggaaaagagaatagggagtagagggttgtgaattccaagtaaatattacaacattttatctagtcacatgactgtcatctatattagtacatttgagaaataaacagaacaatataagaaaaaccaaacaatataataaataacacataagaatttttacatattttgatgagctaactgaatctaagtcagtaatattatacatacagtttgtcaatgacatgaaagtggaaaagtttgtgagataagaatgaaatgaattatagaacatttcatattcaaactgattgaacccttaatgaaattgatttcagtttcttacctaagaaagaatttaaaactttaaatgtgttgcaaaagtcaaaataaaagataatttgaaaaatgagactcaacaaaaagactttttaaaaacgattttttggggaagtaaactttttaaaaatatatagaatatgttagctgcaactacaattattcttaatgtacaaatgataaaaatttattaagattactgaggaaagttgtagaaacatcctttgtattttagaacaagaatcataagtgggttttgtatctccattttctaattatttgatttcactatttatacaatcatttatttatatgctgtttgtattagtctgttctcacactgctataaagaaatacccaagactgggtaatttataaaggaaataggtttaattgactcacagctctgcatggctggggaggcctcaggaaactcacaatcatgctgaaggggaagcagacaacttcttcacaaggcggcaggaaagacagaagartgaaggaggaacttgccaaacacttataaaaccatcagatcttgtgagaactcactatcgcaagaatagcatgggggaaaccgtccccataatccaatcacctcccatcaggttcctccctcaactcctggggattacaattcaagataagatttgggtggagacacaaagccaaactatgtcactgtttcctagttaaaaaaaaaaaaaaaattcctagaatgtatccatcaaataaaaattttaaattttataaaagcagacaataactacatttttacaatctaatgtatcatgggtgctaagtggttactgagtcatagtaaaataataaaatccaaactgtttaagctacaatacaagtttcctgaggtactgaagtgataaaaaagagatttgaacatggaaagtgtattaggggttatacttagacaactaactgagtttttaatgacaaatctcacatgaatatagacaaccttaaaattgcaaggagaatagaatatgtaacaattcacattttacaaatcacaagttgtattctaggaagattttgacagtactcaatgaccatagaaaattgacatggactctaattaattattcatctggaaaaaacccctgggataaatcaacaagaatcaaattgcagacacatagaagaatttggtctaaggccaaagataatctaggcttaggctgtcagaactgacttcctcttaggagaaaaaattaaatctgatagatatgaggcttacaacccactataatatcttggcttttttttttttttttttttttttttggtggggtcaggggtcattgttttctaaatttgtcctctttctttttctgcatacaaaactactccagaagatttattctattttaaagtaaaatgcataaaactatatttaaagtaaattaaatgtaggaggggttatacataattgcctctatttactgggcgttcagtggctgaatctgaaatcttcccacagtcctacccttcagtctgttttgttcctcacctggaacccttgctcttaagacctaaaaataacctgactggtttagcaagaagagtgatcctgaaggaattgttataagtgaagtcccccaaggctgtcctgatattgaaagctttgtgcragagggatccagtggagttgatgaaacaaaaaccaggcggctttctatacgttccgtttcacagagaacagaaaagcacggcagggatcttcacacrctgttggttctcctctcttgcttctgagcagggatttttttttcctttcactttggtttgagccctgttgtttcaggtagtcaatatataccctatagctaacttcctgaagggaaaaatactscatcagcttttaaatgtgggctctctctgctagccatgtaagagcactacagagatggaaggatttaaattagttctgttcctcaaaattcattagcagcacctctatattaggcctcaccttctatgtttaatatctaaaataactcagccatccagctcaaatctggagatattgtgtcagattacatcttcctgtgtacttttctctatttacccagctagcttcattttgttaagcattccttaaaaaacccctctgtrtgttaaaaataaactaccacaaagaaactggttcaaatgtccacaatggcacgagagactactagggttattgtctgtacatttaaatacacacaaatgtgtgcagacacacatacacacacgcagaggcatatacacacaggcttgtaatttggaacatggccattctatgttttggaaaacatatcttttaaataaagggatcacttgatatctgatttattcagcactagttttctctcttctggagcttacaaattagtgaaaaacaaaaacaaagtaaaccaamaagctctaatgatatagttttcatcgtgtacacacatacgtgaacctagacattaagctgggatttcactctggtctatgagtagtcattagtcactgcaacacctgcaggttccatatgctcgtgacaatctctcaagataaatgtgctctattatttaagatttatggttctgcccatgaatcatcactatatataattcaaaaactggcatttgcccttgtgctattacattttattttcccattctatcaatgtctacatcttatttttagaagctaaaattagtttgtcttaataaaataatgatatatgttaatgggcctaatgtttttgaattacttagaattttaatttgttaattaggagaaatattgattatctcacagaaataagttattttataaatattaaatatgtactattacaatataattaaataatttatttttaaaaattatttgagtagatgtttggataaatagaaaagatttggtttctagaggctaaaaaattttgaacttggaagttaaactggagaagaaagtttattggtttgaatgactgaatggcctttagattaaggaaagttctgttccacatgaatagtctgcttctaagaatcaagacaaaaagtgtggaacaaattattggtatctgaactgaagcaagttcgtgtttaacacacaacacaaagtaggtgggtggctctataaaatgattaaaaacatggaagatgcatccttatcttgtaaacagatataacagggctaagattacccatcagagagtcacttcacaactttattttttccccatggctctctagtgcttaaaggatgggatttctatttcatcctgtcataaattatctctcagaatccatcttgaccttcttcccaaatttggtctctcttctcccatacagcaaatttttaattgactcccaggrwacatctatgactttataaaattttattttctccgaattttattcccatttctctcttaagataaagcaaaataaaaccaacaaaaagtaatcttagatgtcattcagggctggagaaaaatacaccgctcctccttaggtttcctctatttttccaggcagagcaattgactccctcctctgttactcgaggactttcagtatgtgtctacttgagttcttatcacagcatacaataagtgtatgtttacaggtatttattgccrcctagactttagaagaatttaaagtctatgcagaccccacaaatttgaatacacgcaacagggcagacaggtaatggaattgggcttttggaaaaccacaaattgtgacaacaaatggcagcccacccagagaggtgatggagartagggagtggtggatattgtgaataactgcaaaatgcatgctgcatctaagggaggttagctgcttctccactttggccacctgtgtttcagttagaataccagatcaatatggtcatagcttctggttttcaagagaagctaggaatgtggaattttatgtgtaatctcccattatataaatgctaccagccaattcctccaagaacatttcttttatgggccaaataaaacacggatttatgctgaaatttgtccatttaatattggagttaatcaagggtagctcctgggcctcctcctcattgtatatttttttcccctaatcaatctcatttaacacatgaagattcattttcttctgtatgcacataactcagaaatttatatttctaattcaagacacatctaactgcctacttgccatctcctcttggattgctgataacacttacatatatttatatattcaaaaccaaacttaagacaatcgtatcccccctttttagtgtaacatattttaacgtgtgtaactgtccatctaagtagcagttatctttgaccattttttccctcaccaccctttccaattcaccaacaaagtcaatttttccctactaatactaacctcttaattctagtcatttctttgtttctccaccgtaataaccctggtcgaaaataccatcatctctcccatgaactacttctcccataaactcttcagtgtctctccagtattcccaaaagtgcagctaagtgatctcctcaaaatacaagtcaagcaatgtttctacattgcctactgcttcagtgtttttccattattatatgggatcaagaggaaaacagttggacaaaaaccttgaaaaacaatgtggctagtaaggccctgtctggtttgaagtctcccaacctttttatcctcattgtctgccacacgtcttgcactgtttcagccttgctgttctcatacctctaacttttctttttacatgcttgtcttttctttcccttactaacctccattcatctcagttctacttcagattcctcagccaaaccaccgaacacctctgtaccattaatcacaatataacatgggttatgattaagtgacaatcacaacatctgtctccctatatagattccaagttccatgaagacagggattctctgtttctccttattgtatcaccagaaataagcatagtatcaggcaggagaaaataagaaatatttgttatataaatgaattcatgaataaataatactaaaaatattgttaaattaaagatttaaagtggatggatgaatggagatggggaagtcctgaaagtcctatttttctagtttcactagaagaaaatggatctgggaaaaaggagacaaaactaagatcttattacacacttaaattatgcgttgaatcaatattccaatagcaaggaactattaaataaagtaacttatctgtgtattatatgtgcctatgtttactaatgtagatatacataatttgatttgaaaaacatagcaagtacttttaaaaagttctttttcaacttcattagtgatggagaataaatagcttagagttaaaacataacctttagctctcagagaggcacctctgtttctactgccagatatttttctgctaaggtttcactacatcattctattatagactgatctttccccttttgtgcttaactctggaaaaaaaaaattagatttcaccgagtaagattttaacctgaaaatgcaaaaatccatatataagaataaacatttccaccacaatatagggaataaaaatcagtaatgaccaagaaaatatttgtaactactaaaatacaagaaagagaataaaaatactttgaaggtctgatagaaaattacacaatagtcctcctggcgaggtcaacgcccaggctatggcagccgcttcctcatgtcagcgctgctccctccaccctcaccccttccacctcggggcagttcgaaatgaagctgttgtcatttctggaaggaaactggcccagcagatcaagcaggaagtgcggcaggaggtggaagagtgggtggcctcaggtaacaaatggctatacctgagcatgaacctggtcagcgagaatcctgcaagtaactcatgtcctcaacaaaaccagggcagctgcagatgtggttatcaatggtgagacgattatgaaaccagcttcaatttcagaggaagaattgttgaatttaatcaataaactgaataataatgtagatggccttattcagctgcctcttccaggcatattgatgacagaaagacctgtaatgcctttctccagacaaggatgtcgatgacttttatgtaattaatgtagggcaaatgtgtttggaccagtattccacgttaccagctgccccatggggtgtgtgggaaataattaagcaaactggcattcycaccctagggaagagtgtggttgtggctggaaggtcaaaaaatgttgaaatgccagttgcaatgttactgcacacagatggggcgcatgaaggtcccagaggtgatgctactgttacaatatctcatggatacactcccaaagagcagctgaagaarcataccattcttgcagatattgtaatatctgctgcagacattccaaatctcatcacagcacatatgatcaaggaaggagcagccatcattaatgtgggaataaatagagttcaagatcccgtaactgcaaacccaagttagttggagatgtggattttgaaggagtcagacaaaaagctggttatatcactccagttcctggaggtgttggccccaaaacagtggtgatgctaatgaagaataccattattactgcaaaaaaaaatgctgaggcatgaagaacgagaagtgttgaagtctaaagagcttgaagttgccactaattaactaattgtgtcttctatgtcacaaacagcactccaagccagctcaagaagcaaagcaggccaatagaaatgcattatttttaatttattctactgcaatggtttcaaatgatgcttcctatttattgaacgcttaaatgagtaggtgtttgtgcacatagctctgcagtacctcaccagggagcattacagtattatgcagggtcatgtaatctagccaagagcagccattaacctcgtgattaacacgggagacattgtcatgttgagaatggatgcttaactttatgtcaaatacctcggttaaacatttgcgttttctagaatggcatttcccaagtgctattccaataacagttgatactcattttaggtactaaaccttttgagttcaactgatcaaaccaaaggaaaagtgttactagagaaaattagggaaaaggtgaaaaagaaaaaaatggtagtaattgagtagaaaaaaaattaatttatatatgtcttgattggtagccagatttatctaagtagaactgaatcggctaggaaaaaaggaaaactacatgttaatcgttttctaagctgtattttgaagcttagtcagtcattgggaaaatgtttagaatttttccttgctattaggcgttattttatgtatgttacccttcagtaagttcttcccattttagttttctaggatttaaaggcttattttaaacattatgtgtattgtcatattgttaaatttttgtattgtatcatttctttgatatctcttaaaacctatttttgaaaaacaaacttggcttgataatcatttgggcagcttgggtaagtatgcaacttacttttccaccaaagaattgtcagcagctgcctgcttttctgtgatgtgcccttttgacttttccagaaaatttttaagagtttgagttaatattgaatttaatcagactttctgattaaaggttattattttgtttcttttttaataaaacacatctgtctggtatggttaaaaaaaagaaaaaattacagaataaaagagtatcattgctttcagcatttaagtttgaaaacttttttttcctcagcaaaatctttaaatgatactaattgaaatccttttggcagaaataagttttgctaaaaaacacatcttagattttgtttattttgaaatatgtatattgataactatgtgagataatgcatgttagccaaatgtagtaattccacaatgtatatatacttcaaaacatcatgttgtatatagtaaatatatataattttatctgtagatgtaaaaaataaaataaatttccatgatatcaaaaccagacaagcacataacaaaaatagcaaactacaggacaatatccgtgatgagcatcaacaaactactaacaaagtgaattcaacagcacatcaaaaagatcatccattaggttaaagaggaatttatcctagggatgcaaagatggctcaacatatgcaaatcaataaacactgatttgcattacattacattaatagaagtacaaaaataatatgatcatctccatagacacaggaaaagcattcaataaaattcaacttgacttcacggtaaaaatccttaacaaattatatgtagaaggaacgtatctcaacacaataaaggccatatatgacaaacccagcgttaacataatactgaacagggaaaagttaaaagctttttctctaaaattgggaagaagacaaggttgtctacttttaccacttctttttaatatagtactggaactcgtagacaaagcaattaggcaagagaaggaaataaagggcatccaaattgaaaaggagcaagtaaaagtgttcctgtttgcagatgacattatcttctgtatagaaaaccctacggactccaccaagagactgttagaactaatgaacaaattcagtatggttgcagaatgcaaaatcatacaaaaatcagtagtatttctatatacaacagtaaaatatatgaaaaagaaatcccatttacaatagctacagcaaaataaaatacctaggaataaatttaaccaaagaaatgaagtatctttataatgaaaactataaaacattgataaaggaaattgaagaagatattaataaatggaaagatatcctgtgctcatggattagaagaattaatattgttaaaatgtctatactacccaagcaatctgcagatacaatacaatccctatcaaaatcccaatgacattcttcacagaaaagcaatcctaaagtttgggggaaaaaaaagacattttgagtattatattattcagattattcagaaatagaaataaggcaaatatattatctctggtatattgtctaggttggtctatttttctgaaatttcattaatgagtgtcatctgtgaagtttgacattaacatatcatgtattaaaattattttaaaatgtattccttatcttgtgtatatgtatatattacttttacatttttgctttcgattctaagacaaatttatttttcctcagtcatacaaattagtagatgacaaaataatctcaaaaaccaacaatattattataaatgaaccttttaacattacctaagaataagtaccagttttgtgctatgaagatgactatctatcagattattctgttatctctgctatgactgagacttcaataattataccttctgaaaattagatttgagggggaatgtaacaggtttcaggattttttatttaacatttaaccttaaaccgaacatttaaccttaagaaaaattagatctcagaactttatctcacttgaaatcacctcaactaaaaagatataagaataaaggaaaaaagcaaaaatcagctgctgatacagggaaaattttgctgccaggaaatcagttccacgggatcaatctgcctgaggctcatcttgacttcattcataacaaaggtgtgtaaatcaatgcttattttaatgctttattagtctatctttatacattatgtttttttatttaatagagaatgatgaatgcttttcttataattatgaatgaatatagtgtcttagatttgtttagtgttgataagtatgtcgctatgctgcaacagcatttcttaaccttttgggggaaccattccagaaacttagagcaatgaactctttctcccagtaaaacacatgtacacaaattaacacaaattttgcgtagggttttgaggtgttactaacacccttatgctcctttagggaaatccttctttagaattcagtacaggacctgtttaaaaccatgctgcttctacatttttcgcataatgacaaaggaatctgtaagagtgtggcaagattatttttctacaaggcacatctctaactgaaatgctgtgcattatgctgatgttcttgccagcaaaatgatgttggtgatatttactcattcattcttgatgaatatatatatttacatatatatattcttcttttactatagttcagttttttactatagttcagttcattcttaccattccaaattaatggaagttagtaattctgtaattatccaaaataatacattatccacaaagcacatattcctaatcatattttatttttaatattccataacatgcatttatcagcatctattaccctgaaaagacaaaaacccagaaatgtgttgaatgatggaaaatgtctcatacataataaaatgatgagtgcaaattttttgttacccagaattagtgattagaactcaaagctgtgaacaaagagcttctaagcacccactttctaaacagataccccaaaaatagaggtcagaagcctccctgcaagatttattaagcagggtcataatcagtcctagaaagcaacagagtggttaatagcacaagtactgtattgaatcagcctggttcaaatgctgttctggccacagtagctatgtaaccatgaacaagtcacttcatctccctgtccctcagtaaaatgagcataataactataaaaagtgtatataacagttatatttaatccatggtaaatgttcaatggtgcttatatcaggattttgtaagtctaggtattttctgtgctttaaaaaaaaaaaatgctccgtagggtgattgtgcagattaaatgccaacatagatgtaaacaaatagaaatgtgcctgggccctggtatgtattcaataaatgtattatatttcgttgttatttttctcatagttaatccaatcatcctctcaaatctctgtgtgtgtaagtgtgtgtatagaaaactggggactagaaaagacacactcaaagggatgggtgcggtgagcccctatggaaaggaaagtgtgttctttgatgagggtaattccctattcccaaggtgcttcctccatctcctaagtaaagtgagggggaaactccattagaatctgtcagctactaatgctccctgtaagaaggagtaggggctccattcccttactagttgccagtttggcaacagacatactgacacaccatgtcaccagtattcctccccatcacatttaatgtcagttcatcctttagataccacctcaagtgtcacttctatagctagctttccttaaccctcaaaccagataaattctcctgtaatagcataacacatgcttctctttatcaaactgatcagttgagatttttatagtttagggttgatttgtttaatgattacttaaatcctaagatataaggttcattaagacaaagattgtgtttttatacctcactccagtgcctaacacaatgattggcccatggttcagtactcaatatatattctgagtactgacatattattgggttcagtactcaatgatgcaaattgggggagagagtcatcaatgttgagttgaaattgaatagtgttgaagaggttcacgtgatactacagaaacagaaatgctagtttaagtgagaaagagatcaattcttgttggataatcataggaggtttatcatattagaggagaataagaatgagaatttgaaggaagataaattttagtaaacaagttaggagagaaatgtaagaaaacgtatgtgtgctgctaaatatactggattaagagtaaattaatttgcaagctgaatgagtttatggaaaaataaaagatgcttctataattgtaaggtatttattgttatatagatccattaatatcatgctaattatttggatactttccacaaagagtggataaggattgaagtttttaagtagagaaggacatgagatacacatcagacaaggtttagtacagaaaactaaaactaggtattttggccagaaagtgatttacaacattaggtaatttaaaaaatggttgcaacaaggaagctaagaaccttgataaaagtttacaggaactgctaactagaacaaccagcttagagaagaacacaaggactatgtgaaaataccaaaactacagttgatcggtgtacctaaaagtgacagggacaatggaaccaaactgaaaaacacacttcaggatattatcttggagaacttacccaacctagcaagacaggccaacattcaaatttaggaaataagacaacaccactaagatgctcctcaagaagagcaaccccaagacacataatcatcagattcaccaaggttgaaacaaaggaaaacaatgttaagggcagtcagagagaaaggtcaggttacccacaaagggaagcccatcagactaacaatggatctctctgcagaaaccctacattccagaa

SEQ ID NO: 94266 - DNA, 33624 bp, Homo sapiens
  misc_feature (1)...(33624): n = A,T,C or G
tcatcagagaaatgcacatcaaaactacgagatatcaactcaccccagttaaaatagcttttatccaaaatgcagtcaataatgaatgctggcgaagatatggagaaaggagaattctcatacaccgttggtaggaatgtaaattagtacagccactatggagaacaggatgaaggttccccaaaaaactaaaaataggactatcatcttaatataatccagcaatcctactgctgggtattaacccaaaagaaaacaaatcagtacatcaaagagatatctggccaggcatggtggctcatgcctgtaatcctagcactttgggaggccgaggctggtggatcacttgagggcaggagtttgagaccagcctgggcaacatggcgaaaccctgtctctactaaaaatacaaaaattggcagggcgcggtggctcacgcctgtaatcccagcactttgggaggccgaggcgggtggatcacgaggtcaagagatcgagactatcctggctaacatggtgaaacaccgtctatactaaaaatacaaaaaattagccgggcgcggtggcaggcgcctgtagtcccagctactcgctactcgggaggctgaggcaggagaatggcgtgaacccgggaggcggagcttgcagtgagctgagatcgcgccactgctctccagcctgggcgacagagcgagactccgtctcagaaaaaaaaaaaaaattagccgggtttggtggcgggtgcctgtgttcccagctcctggggaggctgaggctggatcacttgagcctgggaggttgaggctgcagtaagccgtgactgcgccattgcactccagcctgggcgacagagggagactttgtctttttttgtttgtttgtttgagacagagtctccctctatcgcccaggatggagtgcaagtggcgcgatctcggctcactgatacnnnnnnnnnnnnnnnnnnnngtcaaattccacatataagtaaactaagaaccaaaaagaataattgggcttagtagtttacaaatttggtcacctttgccaaagcagtttcaggagacaagatgaggacagaaacctgactacagcaggttcaagaataaagagataaacagtcaggaaacatactctattctttcaaacaaaccctatttaaaaaaaaaaaaagtaacttgagacaacatagacgtaatcttgtttttttgttttttgtttgagatagagtctccctctgtcacccacccaggcaggagtgaagtagtgcaaacacagctcaccgcagcctcgacctcctgggctaaagcaaccctcccgcctcagcctccggagtagctgggattacaggcacgcgccaccatacctagctaatttttgtatttttagtagagacagggtttctccatattggccaggctggtcttgaactcctgacctcgtgatccacccgcctcgacctcccaaagtgctaggattacggtcgtgagccaccgcgcccggccaagatcctgtcttaaaaaaaaaaaaatcccacaaaaaacaaaatcctgtttccatgagcagttactcctcattatctttgaacactatcctcatccccatccctaggcactttttgtcttacagatttgcctattctgaatatttcacataagtgcaatcacaaccctaggtatatttcatataaattgcccccattcctaggcagccactaatctgctttctgtctctatagatttgcctgttatgaacatttcgtaggaatacaatatgtactcttttgtgactggattatttcacttagcataatgttttcaagctttatccatattgtagtatatataattcctctttgttgccagaaatatgtcattgcatggttggatatgccacattttgcttctccatttatcagttgatagtcacttgggttgtttgtactttttttgaatattgtgaataatgcttcacaaaaattaatttacaagtttttgtggacatttgttttcaattctcttgggaatataaatccaggagttaaattgctgggtcatttggtaactctatatttaactttacgaggaaccaccaaactgttttcaaaagcggcagcaccatttacaattttaccagctgtgtatgaggattccaattccaccacatcctcaccactccttgtcattatctgcattttgattgtagctatcctattgggtataaaatgatatctcattatgattttgatttgcatttcccatgcaaatcttttcatgtgcttatgggtcatttttctatcttccttgaagacgtatctattcagattctttgctcattttaaaatttggttgtttatctttttattactgtgttatttaagtgttctttatatattccagatagaagtcccttatcagatacatgtcttgcaataatttttcccaattctgtgagttatctttctatattcttcatgatattgtttgtagcacaaaagttcttaaaattttgatgtcttattttttcctttgttgcttatgcaaaaaaagccagatgagattttaatagaaattgcattgaatctgtagatcaatttggggaatatgccattttaaccaaattaggccttccaatttatgaacatgggattctttcaatccttccaatattttccaatatttatgttcaacttctctacctcacacccagtcagagatacaatccaggtctatagtatggtggtcaaaagtacagattctttcttaagacagatttagtttaatatcccaacacttctactgattagctgtgtaaatatggacaaattacttttcttttttttttttttgagatggagtttcactctgttgcccaggctggaatgtagtcgctcaatcttggctcactgcaacctccacctcctgggttcaagcgattctcttgtctcagcctcccgagtagctggggctacaagagcacgccaccacacttggctcatttttgtatttttagtagagacggggtttcacgatattggccaggctggtctcaaactcctgaccttgtgatccacccgccttggcctcccaaagtgctgggattacaggtgtgagccaccgcgcctcccctacttaatttttctaagcctatgttttctcatctgtaacgtgcaatttttttttttttagacagggtgtctctgtcaccaagctggatggagtgcagcatcatgatctcggctcactcctgggctcaagcagtcctcctatctcagcctcctgagtagctgggaccgcaggtgcatgccaccatgcccagctaattttcgtattttttgtagagatggtgttttgtcatgttgctcaggctggtttcttgaactcctgaactcaagcaatcttcccacctcagtccccaaagtgctgggattacaggcgtgtgccaccacacgtagcctaaagtacaaattttaatacagatttcataggatgtgaggattaatgacaaatatgtgggacacttagcatagtgcctggaacacagcaaatgctcagtctgagctatttttattattatagcacttaacaattactacaaaaagttattttgactttttaaattattagagccccaatttccccctaagcatccttagaatccattgactttatatcttgtttccctacaattttctgtgtcttccttaaggataatgaaccaatctgattttttttttttttttttcagacaatgtctcgctctgtcacccaggctggagtgcagtggcgcaatctcagctcactgcaacctctgcctctcgggttcaagcgattcttgtgccttagcctcccaagtagctgggactacaggtatgtgacaccagacctggcttaattttgtatttttagtagggtttcaccatgttggccaggctggtctaaaactcctgacctcaaatgatgtgcccacctcgggctcccaaagtgctgggattacaggcatgagccaccatgcccggcctactctgatctcatctctgatcaccatgctctttcctagcctttcctcaaacggcacactcccaccccagggcctttgcatatgcttattttgctctgtctacaaatctctttccatagatataaatttggtttcttcatcaccttcttcagggtctttgtttaaatattatcttaacaatgaggctgaccatcctatataaaatagcaaaataatccctctacttatcttgctttatttttcttcttaagctttataaccacgacacattgtatatttactcgtttgtttccccttctagaatgtaagttacatgaggacagagattttcatgttttgttccctgctgtatcctatccctataacagtcctaggcacattgggtactcattaaatacatgttgaatgagtggacttcttctcttggctgggtgcggtggctcacgcctgtaatcccagcactttggaaggctgaggcgagtggatcacttgaggtcagaagtttaagacagcctggtcaacatggcgaaaccctggctttactaaaaatacaaaaattagccaggcatggtggtgtgcacctgttatcccagctgctcgggaggctgaagcaggagaatcacttgactccggaggaggaggtttcagtaagccaagattgtacgtaccactgctctccaacctgagcgacagagcaactccatctcaaaaaaaaaaaaagtgtcttctctcataggcaagtaacttcagtagtaaaacgagaagagagcagcaccaaagtagctctgctgagaggtgaagccagctggacttcctgggtggagtggggacttggtgaacttttctgtctagttagagaattgtaaatgcaccaatcagcacactgtaaaaatgcaccaatcagcactctgtgtccagctaaaggattgtaaacacaccaatcagcactctgtaaaaatgcaccaatcagcgctctgtgtctaggtaaaggattgtaaacgcaccaatcagcactctgtttccagctaaaggattgtaaacacaccaatcagcactctgtaaaaatgcaccaatcagtgctctgtgtctagctaaaggattgtaaacacaccaatcagcactctgtgtctagctaaaggattgtaaatgcaccaatcagcactgtgtctagctaaaggattgtaaacgcaccaatcagcactctgtaaaaacgcaccaatcagcactctgtgtctagctaaaggattgtaaatgcacaaatcagcactctgtcaaatggaccaatcagcactccataaaatggaccaatcagtgctctgtaaaatggaccattcagcaggatgtgggcagggacaaataagggaataaaagctggcacccccaacagcagcggcaacctactcgggtccccttccacgctgtggaagctttgttctctcgctcttcacaataaatcttgctgctgctcactctttgggttcgtgccacctttaagagctataacactcaccgaaagctccacggcttcattcttgaagtcagcaagaccaagaacccactggaaggaaccaactccggacacacttctaggagactacttccagtcaaatggaatgcgcttcctctgatcaagaaatgaatcctaccataagttcaaacatatctatacatacctatacagagtcccatccttttaaattggaagaacttcatgaaattttagagctagttctaaagtgtgcagagagagaactagagatatactaaggttaaaaggtatttgattcccacccctgcttcatcctctccccagcctcataatatatgccttctgtgtatgagggtggacttaatgactttatctttttttaattaaaaaatggatctaatactaacctactttctccaaggatacagtagttctcttggtaataagatcttagatgttcatgcttttgacaatcatggttaacttgcagctggagaacacagcagcatgcctgggaactgaactacaattcccagagtgcatctctaggaggattctgggaagtgtggcagaagcagcaatggtccctccagggaacggaagccgttgaacgtgaacatttggagtttcctcttttgtgctgattcctgaggactaggaaggtgccccgaaaagaattcagagtgagtacagtgaaacagaaacctgctcagcttctaagtgcaggaaggacttcacagggaggcatgatcagaacttgaaaaaaggtcgtggtcacagcattttaacattttagcttaatctcttcctttttgcagaaaccagggatataaccatagttttgcctcataactgtggagctacmtcagtaaccacagctcatcattttctgatacttttttggagagtcatttaaaaatggaacttgccaacctctcacattgtgccttaatttttatttttttttaaaggagggaaaattattttttagaaagcaaactataaagcaggtcagtgagaccttcaaagctgtattcccgtggttcctcagttttccatatttccctgtcccatggaggtccacagtcgtggagaaacggactctaaacacaggcgaagtatcacttggtcgcccaggctggagtgcagtgacacgatctccactcactgcaagctccgcctcctgggttcatgccattctcctgcctcatactccctagtagctgggactacaggcgcccgccaccacgcccagccacttttttttgtatttttaacagagacggggtttcaccgtgttagccaggatggtctcgatctcctgacctcgtgatccgcccacctcggcctcccaaagtgctgggattacagacgtgagccaccgcgcccggcctaaaaaaaggtctcttaaatactagggaacctggcctcttcacggtggaagtaaccactagattcaagatgggctttttttgttttgtcttgttttgttttgtttttttgttttgagacggagtctcgctctgtcgcccaggctggagtgcagtggcgcgatctcggctcactacaagatgggcttttttgtcacgctgtagtactttataatctttcttctggaaagatgaacaggataagaaacgtgtgaatcatttgtgttggggagttcaaagaaactcttaatgttaaagcaccttgcctcatcatttagtagttgggtaagactgctattacctttcatctctatcaaacattgtacttttaaaaacataaatagctctgtgaccatcagctcatgagtcagcagccatgataatctacaactggctaaggttaatttagtagcagaaactaggcaaaacatcaggcagcagttcccaaggtccaagaaactcaccaaatgaattccctttggctcatggaatatggtgaggtgttttggggaacagtggcatggaggtagcctcattaaccagttagtctcaggaactactattttattaggcttttcttttgtcttaaaaggaataagtacacatggctaatttttttttcagtacagaaaaatgaacaaaataaaaattacaggcacctttttcaatatttgtcttcatcccactcccccaaattagtcactctttaatagtttggtatgtatacttctagtcatttgaaaaatataaataaggccgggggcagtggctcttgcctgtaatcccagcactttgggagacccaggcaggcagatcacctgagaacaggagttcgagaccagcctgaccaacatggagaaaccccatctctactaaaaaaaatacaaaattagctaggcgtggtggcgtatgcctgtaatcccaactactcgagargctgaggcaggagaatcgcttgaacccgggaggtggaggttgcggtgagccgagattgcgccattgcactccagcccgggcaacaagagcgaaactccgtctcaaaaaaaaatagaaagaaaaatataattaaatacatataatttatgtatattggtatgtctgtgtccttttttttataaataattaggtcatgttaaccaactgttacctgtttttttctccagctttattaaggtataatattaaggtattaaagtataatatatactttttgacaaaaaaagtatatatttatagtttacaatgtgatgttttgatacaggtatacattgtgaaatgattaaatctagcaaattaatatattcatcacctcacattttttgtgtgtgttgagaatatttaatatctactttcttagtaatttccaagtatataatatattatgaactatagttaccatacaacacaatagatatccagaatttattcatcctaactgaaactttgtacactttgactagtatcacctccaattcctccttgctttttttgtttacttaataatgtgttctaagtctctctccctgttactatatatatatatttttttcactgttatattattttctatttgttctttttcttttttttaagacgacgttttgctcttgttgcccaggctggagtgcaatggcacgatctctgctcactgcaacctctgcctcctaggttcaagcgattctcctgcctcagcctcccaagtaggcaggattacaagcgtgtgccaccacgcccagctaattttgtatttttagtagagatggggtttctccatgttggtgaggctggtctcgaactcctgacctcgggtgatccgcccgcctcggcctcccaaagtgctgggattacaggcgtgagccaccgcacccagcccttctatttgttcttaagtcgcgtattaatccattttatcataattttcagttaacgttcttgtacatatcctttccttcctagggtaaattcctaaacatggaattgctgaggaaaaagagaggcttattatttgacactttaatagatatttccaaatcaacctgtaaaaatatcataccagtttacattctgagtggtgtatgagccagaaataatgactttaaatacattttttatagtatatcacactagttttggggttattaaagtaggaataatacttttaataatctcctagagtgctttgcaacccacatattgcatactgccttctgtgaaagctggctatatatttgttttctctctcctgctagagttccttgagggcagggattttcatcttttacatttttgtgttctttaagggaccctgaataaagtcagtactcaataaatactttgttgaatgtcatttgctaaatatattttacccatggctaggacatagattgtagccaaaactgtccaagaattcatcatcagtgattcataattatgcaaccaagaagtaggactaaattttagatgttcctcggtcatttagtgtcaaagctggctttcctcagacacagtgaaaagggtggttggttatttaactgtaatgaattcttgactttttttactgccaatgtgagaggtacttttcatggggaataaaatactgatatacaatttaaagggaccatcttggccagaatggattatttagttacagattttttttctttcccaatgagcaacaaaaaaatagaaaatatcttggatccatgtgaatttgcatagctgccttctgaaaaaatttcctaatgttgtgactttatatattcttatctacaggattccttctacttcattcttactctaagtgggtagaacaggtttcagttttctagatcatgaaagaagtactgaaatgttgagatcccatagctacttaggggtagaaatgcaatttagaaacaagatcacctgactcctattgagtttgtctttccttaatattacagagtgatcccattctggcttaaagtataaccctcttggcaattcattactttaaatttcatattatgactttttttaaaactccttttttttttttttaaggacctgacaatgtccctgtattgtggaatagcttgcaggagaaaatttttttggtgctataggctgctgtcaacctatgttactaagacacggtgagttttagccaacctgagctttgattattctgtttggcccattaaactattgtgatattatgattttatatatatatttaggtttatgattattatatatacattatatattactatatttgtgtgtgtgtatatgtgtgtgtgtgtatatatatatattcatatatatatatattcatccatggtttctggctcataactcctatggcccttattacagtcttttgytataatgtggggcactttagacctcaggggcaggcctcaggaaacaaaatctcttttaccttctcctgtcctccttttacctgcccatggcaggactctaatctgattgcgggtccaaagaccctcattccagagagggttgtgccccatactccggaggaaggaaggctgcacagagaggccaaggagaacctgaacagacaggcattgctgggtttccggtcagtctattattatkaaatcataaccattttgtccaatcagatttctacatggttgtcaatcatgcctatgtaatgaagccaccataaaaacccaaaaggacagggttcagagagcctctggatagctgaacacatggaagttcctggagggtggtgcacccagggagtcatggaagctctgcaccctccccccacatacctgacctaaatgcatctcttcatttgtatccttcgtaatatcctatataataaaccagtaaacatcaaaaaatatatatttttacttttttagagatggagtctcactctgtcactcaggctgaagtgcagtggtacaatcttggctcactgaagccttgatctcctggggtcaagcgatcctcccacctcaaacccccaagtagctgggactacaggcatatgccaccatgcctggctaayttttatatttttgtgtagagacagggttttgccatgttgtccatgctggtctgaactgagctctggcaatccacctgccttgacctcccaaagtgttgggattacaggcgyaagtcaccaaacctggccgaaaaattttaaacaaactaaatatccaataatatctaaaatatctcacacacttgaatataagttctattaagatcagactttgtctttccactgtggtacccctacttcataaaacagtgcctggcacatggtaggcactaaagtactgttgaatgaatgaacagtaagggagaaattaagtaaattaaggtactataatagaataataaacatgttaaaattatattgttctattcctgtcacttcagatgaaaaaaactgtattgaataatatttcatgaagtttcctataaataaagtagataaccccacccccttcccccaagaactaaacttcagtgaaaggtagagtaggaaaacaaaatctacaatagcacatgaagatgataaagacttttttgtcttagcctagggaaattagaaatctgtgaatttgaaatcactagcctgctttcatacagttttgggggttaaatttataccatctatgtggtgtggttctagaacccttaacctaagaaataatttttttttcttttttttctttttgagacaggatcttgctctgtcacacaggctggagtgcagtgctatgatcatagctcactgcagcctcaacctcccaggctgaatcaattctcccaccaagtagctaggatcacatgcgtagctacttgtacaccaccatgcctggctaatttttttttattgtttgtaaggtagggtcttgctatgttgcccaggctggtctcaaactcctgggctcaagcaatcctcctgcctttacctcccaaagtgctgggattataggcatgagccaccatgcccagcctaagaaatgaatttaagtagtaatcttggactgaaaatacccctggggcaccatgtgaatacaaatataaaactccttaggaagtacacactcacaaccagtgattccaatatataaagccctatcaagctccaaaatttagaggcatataaaggctgggtgcagtggctcatgcctgtaatcccagcactttgggaagccaaggcgggcagatcactcgaggtcaggagttcgagaccagcttggccggcatggtgaagccgtctctactaaaaatacaaaaattagccaggaatggtggcgtgcacctgtagtcacagctactcaggaggctgaggtgggagagtcgcttgaacctgggaggtggaagttgcaataagccgagatcgtgtcattgcactctagcctgcatgatagagtgagaccctgtctcaaagaaaaaaaattagaagcacataagcatataatcctacatgaacaagagtgaacaaacaacaaaattgtgatacttgtttcagatattgttggacatttagattgcgtgtactcctttaacagactacaagaatttttttttttttttttttttttttttttgagatggagtcttgctctgttgccaggctggactgcagtggtgtgatctcagctcactgcaacctccacctcatgggttcaagtgattctcctgcctcagcctcctgagtagctgggactaaggcacacgccaccacgcccagctaatttttgtatttttagttgatatggggtttcaccatgttggccaggatggtctggatctcttgaccttgtgatccacccacctcgacctcccaaagtgctgggattacaggagtacgccaccacgcctggccaagaatattaacataattattaaatagagtgtcttcaccacggggcggaaggatccgcgctggagannnnnnnnnnnnnnnnnnnnnnnnnnnnnnnnnnnnnnnnnnnnnnnnnnnnnnnnnnnnnnnnnnnnnnnnnnnnnnnnnnnnnnnnnnnnnnnnnnnnnnnnnnnnnnnnnnnnnnnnnnnnnnnnnnnnnnnnnnnnnnnnnnnnnnnnnnnnnnnnnnnnnnnnnnnnnnnnnnnnnnnnnnnnnnnnnnnnnnnnnnnnnnnnnnnnnnnnnnnnnnnnnnnnnnnnnnnnnnnnnnnnnnnnnnnnnnnnnnnnnnnnnnnnnnnnnnnnnnnnnnnnnnnnnnnnnnnnnnnnnnnnnnnnnnnnnnnnnnnnnnnnnnnnnnnnnnnnnnnnnnnnnnnnnnnnnnnnnnnnnnnnnnnnnnnnnnnnnnnnnnnnnnnnnnnnnnnnnnnnnnnnnnnnnnnnnnnnnnnnnnnnnnnnnnnnnnnnnnnnnnnnnnnnnnnnnnnnnnnnnnnnnnnnnnnnnnnnnnnnnnnnnnnnnnnnnnnnnnnnnnnnnnnnnnnnnnnnnnnnnnnnnnnnnnnnnnnnnnnnnnnnnnnnnnnnnnnnnnnnnnnnnnnnnnnnnnnnnnnnnnnnnnnnnnnnnnnnnnnnnnnnnnnnnnnnnnnnnnnnnnnnnnnnnnnnnnnnnnnnnnnnnnnnnnnnnnnnnnnnnnnnnnnnnnnnnnnnnnnnnnnnnnnnnnnnnnnnnnnnnnnnnnnnnnnnnnnnnnnnnnnnnnnnnnnnnnnnnnnnnnnnnnnnnnnnnnnnnnnnnnnnnnnnnnnnnnnnnnnnnnnnnnnnnnnnnnnnnnnnnnnnnnnnnnnnnnnnnnnnnnnnnnnnnnnnnnnnnnnnnnnnnnnnnnnnnnnnnnnnnnnnnnnnnnnnnnnnnnnnnnnnnnnnnnnnnnnnnnnnnnnnnnnnnnnnnnnnnnnnnnnnnnnnnnnnnnnnnnnnnnnnnnnnnnnnnnnnnnnnnnnnnnnnnnnnnnnnnnnnnnnnnnnnnnnnnnnnnnnnnnnnnnnnnnnnnnnnnnnnnnnnnnnnnnnnnnnnnnnnnnnnnnnnnnnnnnnnnnnnnnnnnnnnnnnnnnnnnnnnnnnnnnnnnnnnnnnnnnnnnnnnnnnnnnnnnnnnnnnnnnnnnnnnnnnnnnnnnnnnnnnnnnnnnnnnnnnnnnnnnnnnnnnnnnnnnnnnnnnnnnnnnnnnnnnnnnnnnnnnnnnnnnnnnnnnnnnnnnnnnnnnnnnnnnnnnnnnnnnnnnnnnnnnnnnnnnnnnnnnnnnnnnnnnnnnnnnnnnnnnnnnnnnnnnnnnnnnnnnnnnnnnnnnnnnnnnnnnnnnnnnnnnnnnnnnnnnnnnnnnnnnnnnnnnnnnnnnnnnnnnnnnnnnnnnnnnnnnnnnnnnnnnnnnnnnnnnnnnnnnnnnnnnnnnnnnnnnnnnnnnnnnnnnnnnnnnnnnnnnnnnnnnnnnnnnnnnnnnnnnnnnnnnnnnnnnnnnnnnnnnnnnnnnnnnnnnnnnnnnnnnnnnnnnnnnnnnnnnnnnnnnnnnnnnnnnnnnnnnnnnnnnnnnnnnnnnnnnnnnnnnnnnnnnnnnnnnnnnnnnnnnnnnnnnnnnnnnnnnnnnnnnnnnnnnnnnnnnnnnnnnnnnnnnnnnnnnnnnnnnnnnnnnnnnnnnnnnnnnnnnnnnnnnnnnnnnnnnnnnnnnnnnnnnnnnnnnnnnnnnnnnnnnnnnnnnnnnnnnnnnnnnnnnnnnnnnnnnnnnnnnnnnnnnnnnnnnnnnnnnnnnnnnnnnnnnnnnnnnnnnnnnnnnnnnnnnnnnnnnnnnnnnnnnnnnnnnnnnnnnnnnnnnnnnnnnnnnnnnnnnnnnnnnnnnnnnnnnnnnnnnnnnnnnnnnnnnnnnnnnnnnnnnnnnnnnnnnnnnnnnnnnnnnnnnnnnnnnnntgaaaatactatccttattaaataggttaagtataggtttcatcaatgctccctttgttttctttttttttgagatggagtctcgctctgtcatccaggctggagtgcagtggcgtgatctctgcttactgcaaccttcgcctcccaggttcaagcgattcttcggcctcagcctcctgagtagctgggactacaggtgcgtgccaccatgcccagctaatttttgtatttttagtagagacagggtttcaccatattggccaggctggtctcgaactcctgacctcgtgatccacctgcctcagcctcccaaagtgctgggattacaggcgtgagctaccacgcccggccaggtgctccctttgctagagataaggagttaatggtatctactttgggatctagatgtctgaagtaagggtacattgaaggtaaaatttgttctttatcttccctagattgaatgagggtcactgaagatacagtgtttactctttgtctgctgtgaaaaagtctgttcccatctctaggtattttgtggttgatgttttatcactgtacttgttttcctttcactccactgcatgtaaattcttgcctcacagtgtaatattggcagagtamcttgaagttcaattcagtaaatatttattacccttgaagttcaattcaataaatatttattgaatcgagccattcaatatgctaactacagagatacagagctgagtaaagcataccttccccttaaggagatcatagtctctcagaggagacagacaaatgaacaaataaaccaatagtgcaaccacagaagtatgggtgaggtacacagtaagacaaaggagggaatgaatgattatctatagccacctcaaaccctttttggrgcaaattaggttgtaaataaataaagggaaataaccatggtaagagagggatgcagcgacagcattctcaaagatgaatgctatacaggtaactaagggtggttttgtaatggtttgattatttcccaaatacaggtatttatttgaactgaaggaagatgatgatgcatgtaaaaaagcccagcaaacaggagcgttttacctctttcatagtctggctcctctgcttcagacttcagcacatcaatacctggccccccggcacagcctgttaggtaagtccagagtggaccagtggcgttgaccagcctgtggccactacgcagaattcagcccataatgaattctaagaaagatccttgaactttggagtctagatttttcagaaagcttttgagtctcatgcttgtataactgcttctgccaactaataatttattgtatgaactctagttgtccagtcaaatattatttggtgatgaaatgaaccactaatgccttaaaccaggggttggtaaaactgctgtccaaattgtatctgctacctgttttgtaaattaatttttattggaacatagacgtactcattcattgacatattgtctatggctacttttgcactacaatgcagagttgtgacagagactgtatgactcacaaagcctaaaatatttagtatctctttccagaaaaagtttgccattctttgccttagagcagtgaattccagcctccacagaggtacacagttatgctaattcagagttccatcatggccaggcgcggtggctcacgcctgtaatcccagcactttgggaggccgaggagggcagatcacgaggtcaagagatcaagaccaacctggctaacacggtgaaacccgtctctactaaaaatacaaaaaaattagccgggcgtggtggcgggtgcctgtagtcccagctactcgggaggctgaggtaggagaatggcgtcaacccgggaggcggagcttgcagtgagccgagatcacrgcactgcaccccagtgtgggtgacagagcgagactccatctcaaaaaaaaaaaaaaaagttccatcataacttcatttttactagaagggtcaagattaaaagtgaattaaaatgaatttgcttttagaacccttttagcatatttaactaaagatatctaagccattggggtttgtcattcaaaatgcaaactttggctgggttgggtggctcatgcctgtaatcccagcactttgggaggctgaggtgggtggattgcttgagcccaggagttcaaaaccagcctgggcaacatagtgagaccccgtctctacccaagaacaaaaaattagtcgagccttgtggtgtctcaaagacagaaaacaaaatgtgaactttcagttttatatgagtcactatatactaacttccgtattgccagtgaatttctcccataggtcagaagttggagtacttggataagtagtttctagcactgcagaagaatctgaggactccatcagaaggcactaaacattatttagagatttagcaatgtttatgttgtattacggtttttgtgtgtgttatgttgtattatgaacaaataaatatgagtccttcatgaacaagtgtataggatttctccctacacatcactcatctcttagagattggcatctcagatgagtattttactctcgtccacaaaagtagcacattctggaggttaattatagaactggattggtctttacctgcagccttgaactccttggctcaagagatcctcccatctctgcctcccaagtttttgggactacaggtgtgcacttcactgcacccagctgattttattttttgtagagacagggtctttgctgtgttgcccaggctggtcccaaactcctggcctcaagtgatcctccctgccccccagccttggtctgtaccattttaagtgtgatacttatttttttttcaatgacttaataagttaactatcatgcatcttactaactaggggatattttcctttcatgatacagtcatagagtaatacaatgttatacaagaattccttctttggtctaaagtcctcagactgctaatgagaaaacaggcctggagaggttaaatggttagaccaaggttacatagctaattagctgcagttggaagccaagtatacccactttaagctgaagtagatgattttctgtgagtctaatatggctgtagtgatttaatagaaacccttgtgttttgcttttctcccttcccctttctgtttcttagagttggaaaggctcctggrtaaatttggacaggatgcacaaagaatagaagattctgtgctgattggatgctctgagcagcaggaagcatggtttgctctggatctaggtctggatagctccttttccataagtggtacatgacattattcctaacgggtacttcccagtggtcttcagaatttgggatttcacataatggtaaaatttaaaggaaaatttggggaatacaaaaggttatcamctttctattttttaaaaaaggacattaaaaagtgtcatctgctatcatcatcatttaaatgacaataaaggacattttaatgccttctaagttaggtgatgggtacatgaatatttatggtattagtctctgtaccattatacattttatttatttattttatcttattttattgagacaatgtcttgctgtcacccaggctggagtgcagtggtacaatcacagctcactgcagccttgacctcctgggctcaagtgaccctcccacctcagcctcctgagtagctgggaccatgggcatgtactaccatgcccagctaatttttaatttttttttttttttaatagagatgggggtctccttatgttgcccaggctggtctcaaactcctgggcacaagcaatcctccctccttggcctcccaaagtgctaagattataggtatgagccaccacacctggcctatacattttgtatatttctttttttttttttttttgaggcaragtttcactcttgttgcccaggctggagtgcaatggcgcgatctcggctcgccacaaccttcgcctcccaggttcaagcgattctcctgcctcagcctccctattagctgggattacaggcacgtgccaccatgcccggctagttttgtatttttagtagagacggggtttctccatgttggtcaggctggtctcgaactcctgacctcaggtgatccgcctgcctcagcctcccaaagtgctgggattacaggcatgagccaccaagcccggtcacattttgtwtatttcagtatttcataagaaatgttaaaaaacttataacatcattctaatttcttttttgaatacaggtgaataaaaatgtttccatatagctctgggtccacagacctgccattgggaaccactttgctattggctcatggctcctgtcaggctttccttctgtctttaatggtctaggtgtaaatgtagtgatgctgggatgaggttcacataggagccatgaggtcccacttcatctcttttccacggataagctaatgcaaatgttcttgccccgaagaagatcttgagaaatactatgtgctaatgtttcccaaactggcctgaatgtaagaatcacctggtgcttgttaaaacaaaaatagagattgctgggcctcactccatgccagctgctttagaatctccaggtaggggcttgagaatcttgctttttaaaaaaattttatgtatatatttatttattttgagatggagttttgctgtcacccaggctggagtgcaatggtgcgatcggttcactgcaacctctgcctcctgggttcaggcgattctcctgcctcagcctcctgagtagctgggattacaggcgcccaccaccaagcccagctaatttttgtgtttttaatacagacagggtttcaccatgttggccaggctggtctcgaactcctgacctcaagtgattcacccgcctcggcctcccaaagtgccgtacctggccttttttaaattttagagatggggtctcactggagtgcagtggctattcacaggtaagatcatagcgcactgtatgtagcctggaactcctaatggcctcaagccatcctcctgcctcagtctcctgagtagctgggactacaggcacacgccccccacacctagctgaatcttacgaggcaagtttgggaaacactattttaacaggatagactggagagaggccctgaggcaaagtttgtcattgtttaatttcattatcttttctaattttctagcctccttacacaaacctgaaatggagacagagctcaaggggtctttcattgagctgagaaaggcactctttcaactcaatgcaagggatgcctccttgctgtccacggtagattctgatttctcattctgtaggaaatttagtagagcagtaagtgtgggcaaatccatgtgtacacacaaggctagagtgacgtttgatttcttcttttgcagattatagtcctttctacaaacactggcaggacamtgtgctgtagggagattgcttattcttccttcttctgcccttgtttttggcagaaccactgtcaagatcattgtctcctaaagacatgcagatctatggcaataggatctgtcagcctcataaacatttttaatgacccacatagcatgacatatacagtatcatgttttccctaagagaaattactttacattgctttaatgacttgccctcacagctttagatttcacttgctaaagtattttgattgtgcatttaatttaaaaagaaacctctaaacatttttttagttgcaaaaaattccaactttaccagggagaagaacattttggggtgttcaactgtactgggaatgttttatttttaagctggttagtgaatacatgggtgttcattttattacctcatatacttcatatgttttaaataataatacatttaaaaatatgctttcttttattcagatttctgatgctagaggaatatgttcagttagtttacttgtcctgaaatttaaacagtaaccatttaaattacgtgagctgtaaagagattggcatttttctgtgagttgttccagacactaggcccagtgctgttaaagatgagccccgcattctctccaaatgacaccaggcccatcattgtgttcctaggctcaagctcttctccgctggcatgatgctcatcagttctgcagcagaagtgggcagcccaccaagaagaacgtggctggcagcaagcgtgtgtgcccttccaataatataatctattatccacaggtaattattgctgtaagaggacagtaatccaagaagactgtgcgctgctttgtcctggggaaggaagcctgtgcaattccttaattatacactgctttagctcattggcagggcccaaagtgccagcatctcagtttccattcccctttcctagatggctcctgtggcgatcacgctggtgtcagatgggacccgatgcctgcttgcccgccaaagctcctttcccaagggaatgtattctgccttggcaggtttttgtgatataggtgaggagtttaggggatatacaggtgacactggaagatatacaatcttactaatacaatcttctctgtcttgttgctatagagcttgaattcccaagcacattcttttctatcatgtcaagaaaactgctttctggcattttatatatatatatatatatatatataaaattttttcctttccttttttttgagatgggagtctcaccctgttgctcaggctggagtgcagtggtgcaatcatggctcattacagcctcaaccttctgggttcaagcaatcctcccacctcagcctcctgaatagctaggactacaggcacaggctaccatgcccggctaatttttaaaattttttgtagagacagggtctcgccgtgttgcctaggccagtcctgaactcctggcttcaagtgacctacctgccttgacctcccaaagtgttgggattacaggtgtgagccacactatttttttaagcaaattttcaaacataggagattgttgaaagaattatacagtgaacacccatacacccactacccagattctataattttttttcctcttcacatgtaggcatttgtttgtagggaggccacaagctttgtgcctctcatcacattgaccccagattcctgttgggtgtgttataaacagaggagccattctttaggccccctgctctgagcacacccctagattccatgaatttttactacacttactttatcacaaagctgtccatctatccattaatctatcttattttttgaygcatagattgaagatattagtacacttcttcctatttcagcatgcgtaacatttgctagaattcagtatttatttacaggttggtttttttctctagtctattggggtcaaatttgcaaatggtgaaaagtggaattttatgaaagctgagtgcagtagtccctcctactgtcacacttactttagacctagcagacttaagcactgtggttcaacacacagctctggacctgattcttattgttggaatgactcagagttttaggacactcccaagagcatttcattgaaactttggagccagtgttgtgcacctttctcaaatgggctgtctgtatcacccttctagcctacagggctgtcctgaattaatctgagtgcttgtaggtgaaagtgtggaagagaccatcygccgagaagttgcagaagaggtgggattggaggtggaaagcctgcagtactatgcatcccagyattggcccttccctagtggctcactcatgattgcttgccatgcaactgtgaaaccagggcagacagaagtaagttctcatsttcccttatactgtgatatttcttttgcttcatccaacctgctcatcagcaagtacttattaagcacttgtctagtccagcatcatctagattacataaacatgtgtaaaatatgatttagggctgagcacggtggctcatgcctgtaatcccaacactttgggaggctgatgtgggcggatcacttgaggtcaggagttcaagaccagcctggccaacatggcaaaactccatctctactaaaaatacaaaaattaaggccgggtgcgatggctcatgcctgtaatcccagcactttgggaggctgaggtgggcggatcacgaggtcaggagttcaagaccagcctggccaagatagtgaaacctcatttcaactaaaaatacaaaaattggctcggcatggtggcaggtgcctgtagtcccagctatttgggaggctgaggcaggagaatcgcttgaacctgggaggtggaggttgcagtgagctgaggtcgcgctactgcactccagcctgggcaacagggtgagaatgcatcttgaaagtaaattaattaattaatttaattaaatatgatttatgccctcaaggaatttgcaacctagtaaaggaagcaaataatctccattctcccttgcatatatgtcaatcacgagacaatttattttattttattttttttgagacggagtcttactctgtcgcccagcctggagtgcagtggcgcgatctcggctcactgcaacctccgcctcctgggttcaagtgattctcctgcttcagcagagaagtatatacccttgaaattatcaaaccgtcatcactatcaatgccataaacttattcatcacttacaaaagtttcctcccaccccttttatttttctcccaccccacttttttttttttttaattttgtggtaagagcacttgatgtgagatctattctcttagcaaatttttatgtgtataatatagtattattaattgtagaccttatggtgtacagatcttcaaaacttattttgcatgactgaaacctggtaccctttgaccagtggccaccctcccttcagcccctggcatgcaactttttccattttcccctcccttcagcccctggcaaccaccattctactctctgcttctgtaagtttgactattttagattccacatataagtgagatcatgcaatatttgtctttctgtgtctggcttatttcacttagcatgtcctttgggcctatctatcttgttgcaactgcaggatttccttcctttttaaggctgaataatattctattatagtatataccacattttctttatccattcatccattgtgaatactgcagtgaacatgggagtgcagatatctcttcaagatctagatttcaatccagaagtgggatgctagatcaaagggtaattctatttttaattttttgaggaacctccatatttttttccatagtaggtgcaccaacttacattccccacaacagtgtacatgggttcccttttctctacatccttaccaatacttgctgtccgttgtacttttttaatggtagccattaaagaaggtatgagttaatagtagccatcaaagaaggtatgaggttttcatttgcatttccctgatgattagtgatgttgagcaccttttcacatacctgttggccatttgaataccttctttggagaaatgtctattcagattctttgcccatttttaaattggcttatttattttttggtattaagttgtagaagttccttatatattttggatattaactccttataagatagagggtctgcaaatattttctcccattctgcaggttgtctcttcactctgttgattgattccctgactctgcagaagctttagtttgatagaatccctacttgtctatctttgcttttcttgcctgtgctttggtatcatatctaagagaccactgcccagtctaatgtctagaaatttattcctttatgttttctcctaagaattttattgtttcaggttttatatttaagtctttaatccattttaagttggtttttgcatatgatgtaagataacggtccgatttcattcttttgcatgtggatatccaattttcccaacactgtttatataagacaatttaccttttattgtcaggagttaagagtgtcttacatatagtaggcgcacaatcaggcatcatttaatgactgactgcaggattggtcttattgctcaagtcagtcaggatgctgggaactaaaaatataaaactataggtacttgtagttgaaagaaacttaagacgttgtcttttttttttttttttttttttgagatggagtctcattcttgtcgcccaggctggagtgcagtggcacaatctcagctcactgcaaccttcgcctcccaggttcaagcaattctcctgcctcagcctcccgagtggctgggattacaggtgcctgccagcatgcccggctaatttttgtatttttattagagatgggggtttcaccatgttggccaggctggtctcgaactcctgacctcaggtgatcctcccaccttggcctcccaaagtgttgggattatgggcatgagccaccatgcccggctagacattgttttatccaatctcatcttgcacttctctagcatcactgactgatggtctctgcctgccaaagtttgcctattgtatgttttggtttttatagaatatctaatctatttcagcttccttgggatgaagtttgcattactttgcttcttgcaaagatgagactatgcttttgactatcattaacccttaccctttaaaaaaaaaaaaaaaagagtggctgggcacagtggctcacgcctgtaatctcaacactttgggaggccgaggcaggtggatcacctgaggtcaggagttcaaaaacatcctgtccaacatggtgaaaccccgtctctactaaaaatacaaagaaattagccaggtgtggtggcgggtgcctgtaatcccagctactcgggaggctgaggcaggagaatcatttgaacctgggaggggaggttgcagtgagccaagatcacaccattgccctctagcctgggtaaaaagagcaaaactccatctcaaaaaaaaaaaaagtaatatttgtatgttcttttttaattgaaaaatttatacaatcaatagagacacaaggaaaaataggtattattcataatttattctcaatgttaaccactcttaacattttagtatttgtacttccaggatttatttaatgtatcttatctttttttttttactatgttagaaatatatttaactcggccgggcacagtggctcacacctgtaatcccagcactttggggggccaaggcgggtggatcacaagatcaggagatcgagaccatcctggctgacacggtgaaaccctgtctctactaaaaaatacaaaaaattagccgggcatggtggcgggcgcctgtagtcccagctactcaggaggctgaggcaggagaatggcgtgaacctgggaggtggagcttgcattgagccaagatagcgccactgcactccagcctgggcaacagagagagactccgtctaaaaaaaaaaaaatatatatatatatacacacacacacacacacatataaaactctcatttcttaattatgcctcttttgcttctgggcagtatctagaactgactttcacctaacctgaagatcccaggtattatcttctaagattgcttagttctagaatcattttctgacctttggccatagtattctaaattttgtagctcctgaccktacatccttttcttcctwatgtctttcagatccaggtgaacttgagagaattagagacagctgcctggttcagtcatgatgaggtagccacagccctgaagagaaagggcccctatactcagcaacagaatgggactttcccattctggctgccccctaagttagccatctcccaccaactgattaaggagtgggtggaaaaacagacctgttcttccctgcctgcttagcccggatcaagtcacttagatcgctccttggtattcctgagggacaaactagagatcagttgacaaaggagaagtgacaaaagataagctgcagaaggacctcagaagggcagagcaaagggtgagcctacagtaagacacttctatcagcagtgttaatggaagaaattcctaccaatgggcaatcaaaaaagccagtgtgagaagaaaactgatgagctgtcaactgtcaaaaatcagggggaagggggaagcattagtttggatgtaggcccttgttcagtcattttctctaaggccttggaagcaaacatcttctggcatatggcttgttaatgttgtgtttacactaactgccaaaatgtgcctgttgtaagtttggttaaaacttttatcttagtattgaaaatatatagcaagttttaagtcattactgagttacttgttacccttacagaattaagaaaaatagcacagtatgacattttaaaattcatgtacaggtgcattctagttacatgaacatgstagttaaataaaagtcacaattaagtcattatgactcagagtactttataataaatcagatgccctgaggctctgttgaggaagtagaatcccaatgggactccagacagtaaatctttttcgctgttttcagctctgtcacatgctcagtttgtgacccagggaaaagactattgctttgccatgcctgttttcctaaataaaacagttgctggcatttgcacatccacaacgtgttgattaacaaagggattggtggagataaacagatgccaaacctgacctatttcttaaactttatggaataaactaaatttaggatttctcatcattcatatatgatgccataagggagaagagtttatttggggaaaataaaagaaatttccacacctttgttctgatgtctttttctgtcctgtgaattgagaaaattttacaaggtgagaatttgggggtaggggaaaggatccctattggtgacaattaaacatttaagtccaggtttcaagtcagtgtaacaactgaagcaatgtgcaggaggaatgttagaggtcttgctgaaaagaggaaataatcatatcttcagaagattctagggacttatttgtgattaaagacaaaagctccagagaccctaaggttatttacatgtcaaagtcccataggactaagtcccaaagtcccatagcactaaagagattctaaaactagaaaagttaaagcactgaatttccttttgatctcaaaaggtcattgctctctccactgccagcaaaccatcattgctttggggaaatcaaagtgccttcatcaggaaatgttgagggataatatgtgatgggacttgattgtcttgttagattggcagcttgcctttacctgggctgaacccagcatgcagaagggaaaagcactcacaaaagagaggtcctgagatttcttcatatcttgcagttagaagaaaacagttcagggtccatgtgtattaccatctcccaatcttttctatctctatgtgggtgtgtttgtgagcgcatgtgtacacatccccaatctgaaaatactgatagaaaggggagtgtgcggaattcctggttatgagtttcccaaacttaccatggagtaactgtttgttttttgattaatgtgtttttggaaaagaaaagatgagagtggctaacagcaggagctgcaacattgaactttgcttctcagtagtgagtgggaaaagagctttgctgtagaaccccaaggatatctgaaagctgaggcagaagagagcaggcctggaatactgaaaatggcagataaataaaagaaactttggtacaggacctacctgacctgagaatatatacatgggcaataaattatgaaggtgctaaggataaatagaacccatctgggtccatgatgcagaatagaaaaacaggtaaaatcttgtgagcctggctgaaagtcagtcagccgtggcaaccagaataaaaaaaaatttcatttatatttttgcctatcaccctttctctacccaatatttaatcctcaatgaagataaacctaatgtaccacaagtgcgatggggggaaacctttttctcacagttgagctgggacggcattctggccccatttttaacatgagaaatgtagcttcaaaacaaacaataaaaatatatttaaaataattattatttaaaatgttaaaatgttgcacaatatcatctgatgtgttactttagtcaatgtgtaacacttatcctcttccttagttcatttcagtgaacactaggaagacaaaggattggagtgggatatggtatatttagtttttatttatttatttttgagacggagtttcgctcttgtcgctcaggctggagcgcaatggcgcaatcttggctcactgcaacctccggctcccgggttcaagctattctcctgcctcagcctcccaagtagctgggattataggcgcccaccaccatgcccggccatattcagtttttattagttcgtgatagtaagttctcagatgagaactctactacaccattctcctaattcctcccttggtcactggagagggaacagtatgaaactatttccattgtttttacttggatagggtaagatatagtaaaggcatctctctgctgcatacaataataaagaagaatccagagacctagattataaaaacatggtcagtatatggagctgtctgtaaagaagactttttttttgcttttaatggtgaattttatgatatatagataatacttgatttattttaggaggaatatgagcatcattttaagaaataaacatttcatcttagcaaaagatatatcagttatattaaatatcaaaccaattaattaattaaaacaattaagtacagtatcaggtatgaaatatccaaaataggcaaatccatagagacagaaagtagactagtggtttctaggggctgggagtagaagggaatgagagactattagtgagtatggggtttctaatattctagaattagatggtagggatggttgcacaattttgtaaatatactaaaaaccactgaattgtataatttaaagggtaaattttttggtatgtgacatatcaatatagctgttatttacaagtaaataagttctatatcttgcttcaggtacatacatacatgcaaaaattcactgactgtacacttaagatttgtgcacttaaccatatgcatgttatgcctcattaaaaaaattgaaaaagtgaatgagttttcaaatccaaatttgtcaacttgaaattttgatctgaggatgaatagcagtaagggagaaatttaaatatttagaattactccaagggtatattgtggtagggtatgtctttagcatgaagtgtgtgaatttcatctcaaggttgtctaggggctagattctaccctgccgagttcaaaacctgtgtataacccacagctgagatcacaaagacttgtgccaagagggccacatttggggctcatggagaagtcaatctgtaaaacttgtaatgaagaaacatttttactaaatgagtaatctaaactagaaatgaacagaatcatattcaatatttatttaaaaagaaaaaagagaagctaaatgtgctggttaattttttgttggcttacttgttggtctgtgaycggtgttgtcaggcagctgcactcccatgctttgtaaaagattggaagcaggtcctgccagtccagcttgggagctataggattccaatatatttgaaaccaggttcaggtcwacatctactggtgccataacagattctcccgtaccagmatcttcctcatctgaattgttatcggtagtctgggatacaggttccttattcatagagggaaaagaaaattatgggctaatgtatcattaggttgcatggtggttacaataaaaagataactaagccacaatgtaaatttgcattccaaattaaaaaggaaacttcttatccttggtgatataaactgaaaatgaagtctacaagttatatggcctagcacacataataaaacttggttctaaaggttataacacatttctctccaggaaagattcctgcaaatcgaataaattgcatgtctattttgaaatagctcaagggctaatagaattaagaaggtacatttataacttgtctaagagtcttaaaagaaacaaacataaaagtgaatattaaatgaaataataatgtaaattttcttcaaaatgaaagaagcgagtgttcctttctttccccccagtgaaaaagcttaaaagtaaaaacacaaggctttgtggttccaaccacaaagattctaaattgttagttgggcctctgattccacaagctggggaaaggatttgaaagattacagctcgatagacttttatgtccttgctacccaaagcattgtccatggagcagcagagtctccatcgcttggggcttattagaaatggaaaaactcagctgggagtggtcgctcatgcctgtaatcccagcactttgggaggctgaggtgggtggatcacttgaggtcaggagctccagagactagcctggccaacatggtgaaaccctgtctctactaaatatacaaaaattagccaggcacggtggtgcgcacctgtagtcccagctacttgggaggctgaggcaggagaattgcttaaacccaggaggcagagggtgcagtgagccaagatcgtgccactgtactccagcctgggtgacagagggagacttccatctcaaataaaataataataataataataaaataaaacaaaataataataaaaaaaaggaaaatctcaagcttcatcccaggcctacttaatcagaatctatgttgtaacatgatcttttggtttatattcgcattaaaatttaagaaatactgctttagataaatctaatgtatggtttctactagattttgacaattctggaagtgactatagttttaaaagtggtttagatgatcaaagcaaggagaattaacattaattaaaggcctattgtaggttttactgctgtctaatttggttctcatgttaattttatgatatgaggattactggtttatagatacattcacagtggacagctgagctagacttcaaaccctaacccataagactccagggttcttgctctttccataatacctctgtttaggattagacagtggtggcattaaaaactaggatgaaaacataaacggaaggtgaatcctaaatttggctctaaattagggaaaaatacaaaataaactgttaaaactggaaagttatttgaatgtttaagatcctgtttatttacttatgttattttgttttaatccactgtggcccaaggcatagtctcaaaaggtcttgagaacatgtgccctctcttttttaaaatccatttaagctgtagtttttttaaactacttttgaaaaaaaatgtatttaagaagtagtagtgtacaatcgcattctaatttgagcatattatatgactttttattttaaatcctgatagataacgtagaataagtaatataatgaagcttatgttttggaaaattaagtctatgatcctttatcctaccagagttaggaaaacaattaacattcttatttatttcaaatctcacacaccaaaaaaagaaaaactatgataaaatatggttttagctatctgacatactagactcagaaagagaaagaggttaaaaacacacataccacttggttcctagtggtgaaacttttgctgatgcaggtgtgtgctagttcctggtccatctgggccatgtatgacttgagattatcaagtgttcctttcagggaagcctcttcgccaggttcgtgtgtttcaaagtccaagtcatcatcactatctaaacattcaaagtcttcatcatccagatcatcagaatctgactcattaggccttggccctacacagatcccaagaaagaaagagccacttagtaattattattattattattattattattattattttttagttactacacatctcaaaataattagaatgttacccacagaaaaagactaatacacacagtcagtctacttcacaaaaatcccttctacaaatggtaatgctggcagatatgtgtgcatttaatgttgtggaaaagcgtacaagctgaatcaaaagatttagcttaaaaaaaagtgaattcaattaattaaaatatttttcttaaaaaatttttaaaaatacctaataaatgaatacattttgatgtaaacattcaagccatacaagtattgtctccaatctcactctctccccagaggtaagcatcttttagcagtttccgggtatcccaatctttctctctgcagttctgtacatatatacatattataattattttttgagttatctttttattactgatttgtaagtacagtaattccaaaaaagaacaatataatatgggagccaaggtaaaaccctatttaaacacacagcattcagtcactctcaaatatttaatgaggccgggcacggtggctcacgcctgtaatcccagcactttggtaggctgagatgggcggatcatgaggtcaggagatcgagaccatcctggctaacacggtgaaaccccgtctctactaaaaatacaaaaaaattagctgggtgtggtggcaggcgcctgtagtcccagttactcaggaggctgaggcagaagaatggcatgaacccaggaggcggagcttgcagtgagccgagatcgtgccactgcactccagcctgggcaacagagcgagacactgtctcaaaaaaaaaaaaaaaaaattaatgagcagctactatatatgtcaa

SEQ ID NO: 94267 - DNA, 31587 bp, Homo sapiens
tgcttgtaacaccaaggataaatgcctgaggggatggatactccattttccgtgatgtgattactatgcattgcatgcctgtatcaaagtatctcacgtattccataattatatacttgtaggtacgtactacgtacctacaagaaataaaaataaaacgctaaaatttgatacagagctaatcaaaatagtatggtattggcttatacacagacatacagaccaatggaatggaataaagagcccctacatatatggttaaatgattttgacatggatgccaagactttttgatggtggaaaggacagtcttttcaacaaatggtactaagaaaactggatacctatgtgaaaaagaatgaatttgataccttaccttacaccacatacaaaaattaactcaaaatgaatcaaatcccatataaattaatcagaatttctaggggcaggcctggacatcatatttttaaagctccctatgtgatcctaatgtgaaagaaggttgagaacaaccaatctagcctcagtgcagtggaacaggctatgtggctcataaagtagttctgaaacatctttgagctatttttagcagtgacaacactgggcccccaagacaagttttaactaactttgaaggtcaatgttcattaacatgtacattattgatgaaattggtctcattacttttcatcctttctcatacataaagtaagggtattccaaaaacttctatatggaaatagggaggaaaactttgtgaaagaataaagacatttggaacccaagagtttgataaaaacagatgtaaagtgtagctagaattcatgagactgatattcagaaataccctgttctcttcactaaatttctaaccaagttgttgagttggaaaacccatggtataaagaggccgatttctaaaatatgctattaatttaggtagtgaatgctggttgtcacatagagaaaagcatcttgtaaataagtaatgctcaatttttctctatgtgttccaacaatattcttctgtttctcattcagaactgacagcatctctcatcataacaatgccatgtcagcaactgcagaagtcaaaccttagagtctaggtagaaacaactcaggaagggagtgtgtcatattctttctctagaaatccatttgcttcattctttacgattttgagaaaaacactgggggtcacaataggctacattttctttttattaagaggaagcattgcttgagcccaggaagtgaaggttgcagtgagccatgatcaaaccactgtctccaggtgactgagtgagaccctgcctcaaaaaaaaaaaaaaaaaaaaaaaaaagcatatttaaattttctaactaaaacgtattcattccctctttacatattaaaaaagtaatagctaactctgaagctacaaagaaagctgatcagcatagaggggattcaagtattagaagacctgctggacaagattaactttcatattcctgccaacacagaagatccataattccaggctgggcaccgtggctcatgcctgtaatctcagcactttgggaggctgagatgggcggatcacttgaggtcgggagttcaagaccagcctggccaacatggtaagaccctgtctctactaaaaatacaaaaattagctgggcatggtggtgggcacccataatcccagctacttgggaggctgaggcaggagaattgcttgcactcaggaggtggagattgcagtgagccaagattgtgccactgcactccagcctgcactccagcctgggtgacagagtgagactctgtctcaaaaacaaaaaacaaaaaacaaacaaacaaaaaaaccctataattccaaagaaatatacttggatctcaatcctagcaacataaataaaactattattactattattttaagacagggtcttgctctgtcacccaggctggagtgcagtagcacaatcttggcttaccacaacctccacctcctgggctaaagcaatcctcccacttcagcctccagagtagctgggactataggcaaatgccatcatgcccagctgattttttgtatttttttgtagagacaacatccctatgtttcccaggctggtcttgaactcttggacttgagcgatccacccccgctttggcctcccaaagtgctggggttacaggggtgagccacagctcccgaccgtgttatgtcatttttaaaaatggatcaaagacataagagctaaaactctaagattcttaaagaaaatatagggtcaagatcttcatgaccttggatttgccaacactttcttggctatgacacaaaatcacagtcaacaaagaacaaaaaaatagataaattggacttcatcaaaatttaaaacttttgtgcaaaggacactaccaaagagtgaaaaggcaaccaagagaatgggagaaaatgtatgcaaattatatatctgataagagattattattattattattacttgagacagggtcttgctcttttgcccaggctggagtgcagtggcacattctcagctcactgcagcctcaacctcctaggctcaaaccatcctccccgcttagccccctgagtagctgggactacaggcacacaccactccatctggctgatttttgtatttttttgtagtggtggggttttgccatgttgcctaggctggtcttgaactcctgagctcaagcaatccacccacctcagcctcccaaagtgctgggattacaggcatgagccaccgtgcccggccctgataagagattaatatccagagtatataaagaacttctgacactcaacaataacaaaaaacccaattgaaaaatggacaaaggtcttcttaaatagatgtttctccaaagaaaatatacaaatagccaataagcacatgaaaagatgctcaacatcactaattatgagggagatgcatgagatactacctcacattcattaggatgactattgtcaaaaaaaaaaaaggaaaacaacaagtgttgacaaggatgtggagaaattagaaatcttgtccattgctggcaggaatgtaaaatggtacagccactatggaaagcagtataatggttcttcaaaagttaaacatagaattaccatccagcaaacccacttctaggtatataatacccaaaagaatcgaaagcagggacttgaatgggtatgtgtacaccagtattcatagcagcagtattctcagtgaagtattgatacataccacatggatgaacttaaaattatactaagtgaaatcagctggacacaaaaggacacatattatattattccatttatatggggtacctagaataggcaaattcctaagaacagaaagtagaatagtggctgccaggggctggggaaaaggggaatggggacttatcacttaatgggaacagagtctcggtttgggatgatgaaaaagttctggagatggatagtggtgatggttgcacaacaatgtatgaatgttcttaatgccactgcattgcacacttaaaaatggttaaaatggtaaatatgttatgtatattttaccacaatttaaacatgtataaagtttcaagaaatggggggacaatactattaacagctctagtaacagttgcatcagcaaaaagatccttctcaaaacaaaaaagtatcaaatatttcttgccatcttacaattgccaagagcaactgacatcactttcagttacactgattgaaaattaggttgttagaagtataaactttgatgacctaatcaatgaattttcagaaaagtcagaaaaatcctatgatcaaaatattgcatacttataaagtaatatatagtattatataaaattatgacaccaatttttaaaaaatttatgtatatattgatactcatgtatctctattaaccttattatattttacaaataataaaacattttttaaaggaaaaagctttatagttagctttttttttttgaggcagagtctcactctgtcacccaggctggagtgcagtggcacgatcttggctcactgcaacctccacttccctggttcaagcaattctcctgcctcagcctcctgagtagctgggattataggtgcacgccaccacgccgggctaatctttttgtatttttagtagagacggggtttcaccatattggccagactggtcttgaacccctgacctcaggcaatccacctgcctcggccccccaaagtcctgggattacaggtgtgagccaccgcgcccagcctatagttagtattttaatggcaagttcccctgcttttggaaaaggagctctgcatttgcagttttgttttggtgaagccctacaaattatgtagctggccctggtgccagctttcccattgatagcctgtccagctttgatcaagtcacttaccctctgcatcagttttctcacccccaaatgggactatttaatctgcttcatgaaactggcatgaacatttgtgcatatgtgcatgtgtatgtgtgtgcctctgtgtatgtgcatatgcatgaaagtggtttgaaaaagtatagatgctttaaaatattgggtggcattgttgtgactatgaataatttttaaccactgcccttcctggagtctgagtcttcagccaaacacatttactgaaaatgaagaaattaattcatttaattcattattttccatggggctttccagacaaacatttgagaaaggagctaaatgattcatgtggtccataaaggtatcatttttatagactggtgattattttattattactatttttttgagacagagtttcgctcttgtcgcccatgctggagtgcaatggcgtgctctcggctcactgcaacctccgcctcctgggttcaagtgattctcctgccttagccttcctagtagctgggattacaggcggctgctaccttgcctggctaatttttgtatttttagtggagacggggtttcgctatgttggtcaggctggcctcaaactcctgacctcaggtgatccaaacgcctcggcctcccaaaatgctgggattacaggcatgcaccaccatgcccggtcctagactagtgattttatagatggcatttcttcacacgactaaaagcagtctaaactgaaaacgatgccaaaacactagacttcagtcaacagtcttaaaagcctacactcccaaatagactatttgataaaccctctgacttctaagaaactcaaaggaaaaacaccaccaggagagccgagtgcccccagaattgtccttggaccatctgtagatcttgtcttatgatccacttatgctgagtgtaaacagagatactgctgtaaatagaagccaaaatgtccctgcactcagatggctacatctgggagctctgccaaattagaggatttatgcgtcagagccaggtgggttccacagcagaagctggggtctcaaatctgaacttctgcttaacacacacttggtacctactctgacactatcgtgacccttggtaaagtgactattaattcctaccgctggggctttcctgggccctgtacacatcctcctgactctccttggagactatgtaggtagctggctgaggggtgtggctaggaccttcggtcaagctcttctatcaagaggctggccctgaagagccacacttgtaactgatcaacagcttaacaagctggtcggggtagaactccgaatccttcaccgttcctgcgtctcagaagctggctaacatctccctccctccagggtggtagaatccactttgaaatgttctctctccctggccctcccactccctaacctttgccctctttctaattgccctgatctcatcccaacctccatagctatgtttaaagtccacctctggggaacagacagattgaatgttccagataatccctttcccagtcctgcctgacatctgggtagggggtttgtccctggaattctgggacactggctggggtttgaggagagaagccagtacctacctggctgcaggatgaagctggccagtggcttcttggttttgtggctcagccttgggggtggcctggctcagagcgacacgagccctgacacggaggagtcctattcagactggggccttcggcacctccggggaagctttgaatccgtcaatagctacttcgattcttttctggagctgctgggagggaagaatggagtctgtcagtacaggtgccgatatggtgagtgtgcggtttctctttctgtaaaaactgttgctggtggacccatggacagmcccagagaggtcacgatctgtcttgcactttttcctgttatccacttagagctgccagatttagcagataaaaatgtaggacacccagtgaaatgtgaaatccaaataaacaacaaataagtcattagtataagtatgtccagtgaaatatctgggacatacttatcctgacaaattcttcgttgtttatctcaaactcacatttcactgagcttcctgtattgtatctgggaaaccttccctgggccattttaatgagtttgttgtgaggcagttcttaggaaaaaagggtacctggggtgggaagaaggagggtgggtatgagaggcctctgtgaggagttcccagggatgaaaactgaagccgaacattcagagaaaaatctgccatggggcaaaaccacctcctcagctgctctgtgctcagcttggaaacaaattctcccttccccctgctgcagttcacaccrtcctcccagctctcagtccctgactggcatcaatttgctggactttctcaagggagctgtccctgcctgcagcctcggcaacgacaggcatgctgtggagaggaagggttcgtggctcaccagggatcccggggctgtcccctggacttggcgccagatgcagatttgtgagctggcaggagcacttcccctaccttgcctgaatatggctgggggtacacagatataaggtgcacacctggctgccggcacagagcccctggtcccaggggccctggaagttaatgtaaggggagcaaaatgtggagccccaggccttgaagctgggtggcatcgtgtaattgccaatgcgcatgaaaacgttttccaaagcatgcacagtctcaggtctcaggtagcattagttttatggtttaatttatcaactatctcatcaagggattagaaatgaaaatggtgagtcaatttagcctaacaggaaaacacatttgagaaatattttctccaaatactcaacagagaaaaagtcagctttgaagagatgcacaaaaaaactacatacttcccggactcacccttaagtctctctattcctttttgagtggggaaaatcgcttccttatacactaagagtgactaggaggtaatggttaatcattgcatcaggacccaaagttttgcagcatagatgttttaacaatctatggttaaaatctatgttttaaccatctatgttttaaccatctatgctgcagcttctttgtgaaagtttcacagagaaaaatgcctggtctgttaggacccacctggccctaaaaccatgtatttgtccaaggcagttggaccaacgcagaggccttgccactggattatgctcacactgtttgcacggatgggacagggaaggggttgactcacttcagacattggaatcaacacaggtgttttccttcctaaaggcaacacaggactagtatctgtagttcagcaaataggcaacagcaggaatttttattaggaaatcaagaaccaaatcctattcttccttctctagcaaaacagcattaaaagacttaagcaaattttagttgcggagcctctggctgggcagggtggaagccagcagcaactggtgggggatgggaagagtaaatagaagagaaaggcaaataactcttctcactttgtgtaaaacaacctgctcaaagaggggcytgaaaaacacttagaaaaataggcggttatgcctccttaccttggaacccagtagagccaaaaacctggcggctgtgcccaaaagagtacaaaataccttctcaaactgattgtgaatcgagcaatcttttgaacagacaacacctaacaacgagtctgctcttttgtagtttgctttgtgacacatctctcatgcaccgtgctcgtcttttaagtagtggttctcaaactcacctgtgaattgaagcccctggagggcagattcaaccagatctctgggccccaccccaggtgtttctgattagtaggagattctgggcttaggagatcctcctgcctcagcctcccagttagcttgggctacaggtgtgcgccaccatgcccagataattttgtaactttttgtagagcagggagtctcaccatcttgcccaggctggtctccaactccagggctcaagcaatcctcccaacttggcctcccagattgctgggattataggcgtgagccacggcaccagccagattttacctttgataggtactaactactatttaaaacagtgggtttctaacttgggtacacttcagatcacctgaggggctttaacaacacctggcaccaaatcaattaaatcaaaatttctgtgggttggccccagacatcagtattttaacatttttcccaggtgattgcaaagcacagccaaggtaaaggggtgccattctatgacgtcattcttagagaacttcagcccacaggttaaattatgcaggcagataaaactgtgtatgtatcctggtagcccatgatagcatgtcaacattgttttccgtgcttctcatatctaaagtaatttgttctcatgccaacacacaaaatctgtacttgtcaaacaactgggctataaatatgacaagatccagcgtgtgtcaatggcatacctagcacaactgttattaaggagtctctaccagctgggtgcggtggctcatgcctgtaatcccagcactttgggaggccaaggcaggcagatcacgatgtcaggagatcgagaccatcctggctaacacggtgaaaccctgtctctattaaaaatacaaaaaaaattagccgggtgtagtggcgggtgccagtagttccagctactcgggaggctgaggcaggagaatggtgtgaacctgggaggcagagcttgcagtgagctgagatctcaccattgcactgcagcctgggcaacagagcgagactccacctcaaaaaaaaaaaaaaaaaaaaaaaggagtctgtgccaatgcaaacaagatttccttgagaatcgcttccaaaatatagataaccttttccacctccagagattctgatgcagtaggtctgtggtgagaccttggaagtgcacttttaatgggtagtctttgaaccagactttgagaaataagcatagtaatggaaaaatcatgggtttgaatttaggagaaaatatcccattgctggtgaccttgggtgagttatctgactctctcaaccttagtttcctcaaatatgtaaaaataatgttactaatacccaccttgcaaaggtgttgtgagaattaaagataatatacataaagaatcagtggtatatataaagcatggtaggtaccaaacaaattttataaacgttatgagaaagacagtctagtgaacaggttaattgcattcagattcttctagctctctttcaacgtaaaaatgaaaaatcccagaaatcccagtggctggacaacagcctctcagcttccggaagaagtccctcgagggaacaacgactgaagagttatctgcctcatgaaggtctctggagttgggtcaatggagtagtttctataatgatactgttcacgctttcacactttaataaaagatcctgaaaatgaatttcttcctggatttagttccaagagtatcttaaaagtttctttaaatatctgtctattgtaatcccagcactttgggaggctgaggccggcggatcatttgaggtcaggagtttgagactagcctggccagcatggtgaaaccccatctgtactaaaaatacaaaaattagccgggcgtggtggcgcgccctgtaatcccagctacctgggaggctgaggcaggagaatcacttgaaccctggaggaagaggttgcagtgagccgagatcgtgccattgcactccagcctgggcaacagagcgagattaagtttcaaaaataaacaaataaataaataaataaaaataaatatcagtctattttttaaagagaatttttatctgaagttttacagcaaaattttataaacctgtgagtttgtatctttttccagggaaataactcaaagacttcatcagattctccagggaatccagagcccaaaaaaagaaaacagccactggcttagaggcaaacagattattcttgtttttgggcaactgacctcctagtctgctggggactcaaggaggaggggagatgctcctgggatgtgagactttcagtactaacaccgggacgggtaccaggcaaaccaggacaagttgctcaccctactttatgcagtaacttaatctgttttagtgactgaaatacagagttcttctctacaggagaattgcctctgtcctgctgtgttccattgatgtattaatcatggtgcatctgagtgtttctgggaggaaggaggacatacctttctttcttttttttttttctggaattttgtttttcttgagacggagtctccctctgtcacccaggctggagtgcagtggtactatctcggctcactgcaacctccgccttccaggttcaaatgattctcctacctcagcctcctggcgtagctgggattacaggcatgcgccaccacgcctagttactttgtatttttagtagagacgggggtttcaccatgttggccaggctggtctcgaactcatgacctcaggtgatccccctgctgggcctcctaaagtgctgggattacaggcgtgagccaccgcgcccggcctggaaattattttattttctcatgtttgagacagctagttggggttgttgatgaagccatgcctataatagtttagtaaatactcttattattcattcgttatcattatctgttctttgtaacaatataatattaatagaaaaatcatatcattgagtggaaaattgtaaaacaaatgacaaagacataatatgtatactacaaaaaggttcttacaaactgtgaagaaataggcaaaagatctaaaagaaaaatgagcaaagaatggaaataggcaattaacagaaaagaaaaactaaatggtttgcatacaaataatatggtcgaattcagtattgatcaggggcttacaaattaaagtaacaatgagataccacttttagccaacagagtggcaaaatttaaaagaagagtgataggaactattgctgtccgagataggaaaaaagcactcccgtgaatttcttttggaaatataaatgttaatcctttttttaatgttgatttttaagttctggggtacatgtgcaggatatgcaatttggttacacaggtaaatgtgtgccacagtggtttgctgcagatgtaccttttaataaagcatactcactccctcctagcacctttgggggaaccagctgggtggagaggatggacgcaccctcccgggaaggcaaaactcttgccctgggacacaaagccctgaaagtttttactgctgtttccagtgacagagagataaaagggcgggcccgggaggcagtgtctaccgctggcaggtagagctcttgggattcttggctaacacttctcgatctccctccagttggtcttttaagacttttatggtatttcactttattcagaagcttttaagttttataagatcaaatctgtcagtctctttctttatggcttctgaattttatgtcttgattagaaaatcatcctcacatcaagattagaacagtattctgctgttttttctgtgacagcagccatagctaaatcataatagtgtggctgtgttccaataaaactttttttatgaacactaaaatttgaatttgaacaggatcaagttgtcggcctctcactcctataaacagctccagccagaaaataaaacatgtgtggatatgatacattattaatgcctagacttaaaacatcaaccataagctactgaaacaataatttgaggatatggtatccttgaatgatttctgtttctgcctagactgaaaccattaccttttgtcttagaacttatattttcagcttcgtttctaaatagaatttctgcagttaacataaaacattaaataaaataaaaataaccatcatcagctgcaggccggataggaattccattccggtatctttcaaactagaatagcagagttttatcttctgtgagttatcaagggcaaaaaggcagagggtaacccaagaaaccgagccaagtctgtggcaaatgcccttttcagcaaaattattaaaaagatgtttcactctctggctgggcaaggtggctcacacctgtaaccccagcactttgggaggccaaggagggcagctcacttgaggtcaggcgtttgagaccagcctgaacaacatggtgaaaccccgtctctactaaaaacacaaaaaattagccgggcgtggtggcaggcgcctgtaataccagctactcaggaggctgaggcaggagaatggcttgaacacaggaggcggaggttgtagtgagctgaaacgctatcttgagtgtggggctaccatgatgagactagtgtcctcgtaagaagagaaagagaaagaagagaagacaaggccgtctgcaagccaggaagaaggccctcaccagacacagaatgcactggcaccctgatcttggaattcccagccttcagcaccgtgaggaataaatttctgccgtgtaagccatccagtctatgttatttttgttatagcatccaaactgcctgagacagggaatgactgctgaatgggcacaaggtctaccttgggggtgatgaaaatgtttttgagctagataaaagtgatggttgtacaacattgtgaatgtatttaattgcatactttaaggtggttaattttatgttatctgaatttcacctcaataagaaaaagaaggctgggtgctgtggctcatgcctataatctcagccctttgggaggccgagatggatggatagcttcagtctgggaattcaagactagcttgggcaacatagccaaaccccatctccacaaaaaaatacaaaaattagtcaggtgcagtgacagcacttgtagtcccagctactagggaggctgaggtgggaggcttgcttgggcctggagatcgaggctacagtgtgccaagatcacaacactgcattcctgcctgggtgacagagtgagagaccctgtctcaaaaaataaaataaaataagaaaatgaaaagaagcagggcacagtggctcatgcctgtaattctagcagctcattaagctgaggttggagagctgcttgagcctaggagtttaagaccagcctgggcaacatagcaagaccccatctctatcaaaaaatttacaagttagccatgcatgatggcatgcacctgcagtcatagctagttggacagctgagataggaggatcacttgaacctgggagtttgaagctgcagtgagctatgattgtgccactgcactgcactccaacctgggtgacagagtgagaccccatctcttaaaaaaaaaaaagaagatgaaaacaaataaatagttacaccatcaaaaacgtgaaaagacaacccacagaatggcacaaaatatttgcagaattgacaaggcttccaaaatatataaagaacacttacaactcaacagtaaaaagataaataactcagttatagagtgggtagaggatttaagtagacattttccaaaagaatttatatgaatggtaaataaccacataaaaagatgctcaacataatcattatagaaatgcaagtcaaaactactgtgaaacaccacctcactcccactaggatggctacaataaaaaagacagacaatagcaagtgttagtgaggatgtggagaaatgggaaccctcacgcattgctgctgggaatgtggtgcagccactttggaaaacagtgtggcaattccttaaaatgttcaacagggttaccatatgacccagcaatcctattcttatggagaaatgaaacacatgttcacacaaaaacccgtctacaaatattagtagcagtattattcatgatagctaaaaggtgaaaacaacccaaatgtctattaaccgatgaatgggtaaaaaaatgtggtatgtctatacaatggaaggtttttctggcaataaaaagaacttaagtactgatacatactacaacatgtatgaaaccagaaaacattttgctaagagaaagaagccagacacaaaaggccacatattgtatgatttaattcatatgaaggagttgcctagggctgggggtagggagatgggagaggtggttaatgggtacagggtttctttttgagattataatgttccaaaattagattatggtgttgactggacaactctgtggatatgccaaaaccattgaatcgtacacattaaatgagtgaatgtatatgatatatgaattatagctcaataaagctgtcatagaaaaaatataacaaagagattaaaatcataatggcaggccaggaaaggtggctcacgcctgtaatcccagcactttgggaagccaaggtgggtggatcacttgaggccaggagttcgagaccagcctggccaacatggtgaaaccccatctctactaaaaatacaaagattagctgggtgtggtggtgcgtgcctgtaaccccagttactcaggaggctgatgcaggagaatcacttgaacttgggaggcagagattgcggtgagccaagatcgcaccactgcactccagcctgggcaacagagcgagattccatctgaaaaaaaaaaaacatcataatggcaactgcaacagttatatattattgagcaaaaaggtacctcgaaactcagcagcttacaatagcaaagattatatcacacacttgctgagggtcagggatcctggagtggctttgctgggcgattctggctcagtttctcataaagttgaggtcatgctgcccagctgatgctgccatctctggagattcagctggggctggaggatctcttgttaaattcatgtggctattggcaggaggttttagttctttgccgcatgggtctttctatgggactgttcatgacataacttcccctagagtgaacggtgagagagagggagagtaagagagcccaagacagaaatcatggtcttttatagcttaatcttaggaggaacacacctccacttctgcagtattctctgggtcacacagaccactcctgggactatatacaaggaggtgaataccaggaggtggggatcattggaagtcatcttggaccacaatcttataaccacatgtatcacagcaacaaatacccaaactgtggcagaaactgcttagtgtcccctaatatccattcttccccttttctacagtataaagcccctccttccacgttttagctgggctcatggctgcccacttcatttcctagcccaccttggcaaccagattttgccatttgattaaggtctggccagagggaagtatgaggaagtgacgtgtataacattctggagtgtgtttactgaagagaggggctggacccttccaactcctgccatcctgctacaggtaatatggatgtgttggctgaaatgccatcttagaccatgagagccagggytacactccagggytggtagagcagaaagctagaagcagcctgggttccaggaaagtgcagatttactataccagaggcatgagtcttagctctggatttttatgagatattctatcttgtttaaggatctgaataatataggtatatagaaagtataatatacaatatggagaaaattgcagtgctctgttgaatgacatacagaaagacctaagtaaatagagaactataccgtgtccatatttgggaagactgagtatcctaagaaaggcagttgtctccaaatctatacattcaatggatttttcaatcaaattcttggccatttttcttgtagaatttactaagttgattctacaaattcaaaaaaattgcaaaattctttgtgagagtaaaggtccaagaataatcaagacaattttgcagaatgatacgaagtgagggctttaaaacataaacttagtatctaaaaattaaaacagaatgatgagtgcaaagaggcttcaactgcacctgaacctgtacttgaactgtcacatttaattaaaaaaaatttatagcaagtttggcaaatgttaacatttattatgtttgtgcatttggtacatggctgtttgtttctctgacttttcaacagttttgaaatatttcatgatataaaataattaaaaataaatacctggtaggagaagaaggaaggaaggagaaagaaagaaagaagaaaagcagaagaagaaaaggaggaaggaaggaaagaaggtgggaaggaaggaagaaaggaagaaaggaaggaaggaagaaagaaaaagaaagaaaggaagaaagaaaaagaaagaaagaaaagaaagaaagaaactgtcatatgccttactctaaggattaattattcttagcacatttccccagtcttacactagggtcttgtatctcctaaaaagaggcagatatgtggtgaaggagcataggctttggagacaaacaggaaatctgactttatatcctatttcccccactttctctatgatggtaggcaagtcatgcgacctcttagcccgagtttcttatctggataatgggataaaatacccactgcagatggctgtcctgaggtcatctcaggtcaaggttatctttacctgtgagcactgccattgatacaactgataaagcttctctctacacatttgaaagatcttaaaaaacagaaattcaaagctgttcagatcatttctgcttagttctatgaaagaaatgcctaagatatcacatcagggtaatttctttgctctttactcaataatactctgtctacgtttatggaatcttgcttgaatttcctgcaagttaaacccttttgtggtgctgctacaattcggattccttaagtgtacgatcaagttgtgttctgcttgttctttgagtggtgtgtggtcttgcagtgaaggaatgaggaaccttgagttttagttgggttttgccatggcccttatcttcaatgttatgcacttaaaaaacattagaaatgtcagtaaataagtgcttattgggtgtggtggctcacgcctgtaatcccagcactttgggaggccaaggcgggtggatcacttgaggtcaggagttcgagaccaacctagccaacatggtgaaaccctgtctctactaaaaatacaaaaattagctgggcgtggtgacacatgcctgtaatcccagctactcgggaggctgaggcaggagaattgcttgaacccaggaggtggaggttgcagtgagccaagatcacaccactgcactccagcctgggcaacagagagggaccctgtctcaaaaaaaaaaaaaaagtgctcatgaaattttttgagattaggggaaaaagtcaaagtggtttgaaagtcattattcttctgtgacatcatcatcatcatcatcacctgatttggatgtgaggaacagtgacttttaaagaaaaagtgaaatatgcttttagaaaattttcatttgatgaatgttcccaaatgcttgatttctaaatatttcttcttgcttctttcctttcttcctcctgcaaggaaaggcaccaatgcccagacctggctacaagccccaagagcccaatggctgcggctcctatttcctgggtctcaaggtaccagaaagtgtatgtactgccagcattaccttcttggttggttggttttgactgagagcaatcctagagttatccttgatggaagtgattatttctggaaaaaagttgaagaatacaattaagtattttaaattggatatgagggagagaatttttaaagaagatatctgatttccttttctcagggacagctgtccctcagataagcccttggtagtggatcagaactttgaaatcaccactgaaaatgtcagctgaggcttagggcatcatgacataacttaatttgagatagatctgacaggtttgacttattgaaattagtgaaccattccagtgatgtgctagagccagctggtgctggccagtgagagctgattgttacatattgtcatgacttttgcaagcagctgacttcatgttagtagtgccaaattggctatgtttggagagctgacatcatagaaatctgcacacacacacacacacacacacacacacacacacacacccgacgccctgctaatttttgtatttttagtagaaatggggtttcaccatgttggccagagtggtctcgaactcctgacctcaagtgatccacccaccttggcctcccaaagtgctgggattacagtcgtgagccaccgtacccagacacgtggcattttatgaacttagtgacacagtttatgccactacatttacagttgtttataggatgcttagtaatgatgggtgtgtgtgagatgttgtggtttgaccacagtcctcttgtgatcaggagctgtgtgttctatacccactctactttccaacacacacacccacacacacacacacacacgcacacccttaaaatagtgctgtctgggatgctggtgatcttttgatgaacggaggctgaatttttttttatacttcttagccgtagaatcctttgctcacacaaaatctcatatgggactgttaagtgttaattaaatttagaagccctatggttctgctctcttgactacccttctggtctctattttcattactgtaagctgcctctgaattttaaaattactaacatctgaaaaaacaaaaggtgaaaaatggccagaatcacttactgaactaataactaagtaacaatgaacacttgtaatcctgtgactgttggtattctactgagtcattggtgtttctgaattgatcgggatatgcaacagaaatgtgagaaccagctagttaataacaaggtgggcaaggttgcctaaggtccttagtctaaacgtggcatttcttccccttcttttcccttccttcacttttccccagatggacttgggcattccagcaatgacaaagtgctgcaaccagctggatgtctgttatgacacttgcggtgccaacaaatatcgctgtgatgcaaaattccgatggtgtctccactcgatctgctctgaccttaagcggagtctgggctttgtctccaaagtggaaggtaggtgtctcaatggcacgtacagtgcacagggaggtttgttcctgttttcacaccgagatatagccagaaccccttgactcgaagagatcatcagagctcactgaatattctttatggaacactgtggctgagcaagaaatggtgaaggaaagattctgggcactccttcactcaagttcttgctgtcctgcccgcgagctgctggcaccactcctgaaggtaaaagactacaccaaagtcttcccagaaaaataaaaatctatcatttaaggctggagaaggaattgcccaactggcttggattatccattccactgttaaataattttccatatcaggaattattccttataggaccacttggtttggcttaagttttttttttttgtaattttgttttcagtcagggtaggagttcaaaaaaccttttctgcataaaggtctctatatacttgaggataattattttatttaaattaaaaaaaattttttttgagacagaatctcactctgttgcccaggctggagtgtagtggtgggatctcagctcactacaacctctgctttccgggttcaagcgattcctgtgcctcagcctcccacgtagctgggattacaggcacccgccgccatgcccagctgatttttgtatttttagtagagatggggttgcccatgttgcccgcctcagcctcccaaagtgctgggattataggtgtgagccaccgcgcccagcaaggatagttattttaaacaactgctttgctacctagattctagcaccgactctataatttctttttcctaatttacttaggaaaagtttttactgtctcagtttctgaagccaggatattgtatccaggtatgaattagcattttctatttttagatggtaagagttgaaatgtaggctgataaagagctggctccacaccacagagagtgtctgcagtagagagaattttggatcttttcatagatcaatgtctagagtgcagtctggaggtgaaggtgtgagggcttagaaatgtgaataattcagtgtgccctatgaaagggagtatcattctattctgtttctrcagaggctgaaaaagtacctgctgctaatctagggtcaggtcaagttacttcctgcaagcaatgtcctgttgattcattctcccaaatatctctttcatatcccacttgcctggttactgcaaattaacccagtctctgtgtcccatctaattgatagtcaccattgggaccagatatgccacatgaatgtgatcatctcaaccccctgtgtaaatcattcaatagattcctcctccttacggatgaaatccaaactcctcagtatgccatacatggccctttctgattcagccctagccttcctctccaccattatcttgggcatttctggtctgtctcttgactcctgcttcagtgggctcagaactgtcccttcgtagattctacaaaaagagtgtttccaacctggtgaatcaaaacacaggttcctttctgtgagatgaatccacacatcacaaagcattttcagatagcttgtttctagtttttatcacgggatattagatgtttttcttataggcctcaatgggctcagaaacgtccctttgtagattctacaaaaagagtgtttccaacccggtgaatcaaaacacaggttccattctgtgaggtgaatcctcaaaaagcattttcaaagatcgcttatttctcatttttatcacagaatatttgatttttccttatgggcctcagtaggctcagaaatgtcccttcgtagattctacacaaagtgtttccaacctggtgaatcaaactccttgggttgatggcccattcctttctgcccctgtgtgaaacgccctaatcattcatttttgttgttgttgaaacagatttattaagctacaattcacacatgatacaattcacccacttaaatgcttttaaatatgttcacagagttatgcagtcaatcccacagtcaattttagaacatattcatcaccctgaaaaggagccccagggccattaacggtctctccccaaactccccctgcccagcttgaggaaaccatgaatctactttctacctctagaactgcctattctggacattgtcaaaaatcaattgaccataaaggttaggatttatttctagatgcgcaattctattccactgatctatgtcaggaccatgctgcctgttactgtcgttatgcagtaaattttgaaatcaagatgtgttcttaaactgtgtacttttctgtcaagactattttggatattctggatccctcacatttccatatgaattttaggaactgcttgtcaatttctccaaggaatggcagctagaattttgagagggttatggttgaatctatagatcaatttgagaatattgccatcttaacaagattatatttatatcaatgtcctttccatttatttaggtcttctttaatttatttcaacaatgtgtttatagttttcacagtacaaatcttggacttctgttaaatttattcctaagtattttattctttttaatgttattgaaatgtaattgtatttaaattttattttcagattatttattaataatgtatagaaattcatttgatttttgtacattgatcttatatcctgcaacccagctgaaataactccttagttctaatattttttttcatggattccataggcttttttgtatataagataatgccatctgcatatcatcttcctttccaatttggattttttaaattttttctcttgcctaattgccctggctagagcttccaacacaacattgaatagaagtattgcgagtggacatttttgtcttgttcctgatcttagagtaaaagcatttcatctttcaccattgagaatgattgttagctatgactgtcattagacgacctttattaggttgtgggagttctcctcttttcccagttggttgaatgttttcttttaatttttctttctttctttctttctttttttttttttttctgagatggagtttcactcttacacccaggctggagtgaagtggtgtgatcttggctcactgcaacctccacaccccrggttcaagcgattctcctgccttggcctcctgagtagctgggattacaggtgcccaccaccatgcccagctaatttttgtatttttagtagagacggggtttcgccatgttgtcaggctggtctggaactcctgcctcagcctcccaaagtgctaggattacaggcgtgagccaccacacctggccaagtgtttttatcgtgaaaaagtgttggatgttttcaaatgctttttctgcatctattgagatgatcatgtggtatttgttctatatcctattgatgtagtgtatcatattaattgattttagtatgatttagcattcttaggctaaatcccacttagtcatgatgtaaacctttttatatgttactggattcagtttactactattttgttgaggattttgcatccatattcataagagatactagtctatagattgttatttttgtgatgtctttggttttggtatgagagtaatattgacctcataaaatgaattgggcagtgatcccttctctcctaattttttaaaaagcttagaaaggattgatattaattctttaaatgtttggtaaaattccccagtgaagccaagtagaattggatttctttggggaagtttttaattactaaatcacgagcttgggttagtaattgtatttatatacactagtaatctattcatattttctattcttcttgagtcagtttcagcagttcacgtctttctacgaatttgtccattccatccaagttatcaacattttttggcatgtaggtattcatagtattcccttataatcctttttatttttatttttttgagatggagtctcgctctgtcgcccaggctggagtgcagtggtgtgatctcggctcactgcaagctctgcctccgggttcacgccattctcctgcctcagcctcctgagtagctgggactacaggcgcccgccaccacgcctggctaattttttgtatttttagtagagacaaggtttcaccgtgttagccaggatggtcttgttagccaggaggtctcctgacctcgtgatctgcctgcttcggcctcccaaagtgctgggattacaggcgtaagccaccgtgcccggccctaatcctttttatttctataagattgttagtgacatttctctctcattccttaatttggtaatttgagtcctctctttttttcttggttagtctagctaaaagtttgttaacattttttatcttttcaatgaaccaatttaaaaaaattgatatatcattcacataccgtaaaatttaccctttaaaagtatacacttcagtggtttttgtatattcagagttgtacaaccatcaccacaatctaattccagaacattttcattagtcccaaaagaaaccctgtagccattagcagtcactactcattacctcccctaccccaccccagccctagacaaccactattttactctctgtatggattgcctattctggaaatttcatatgaatggaatcatacaatatgtggccttttgtgtctggcttcttgtgcttagcataatgttttcaagattcatccatgttttggtatgcatcagtacttcattttcctgaccattcttgaagtttaaacttagatatcttacttactctaagatacctctcctaataacccttgctgcaaagggatagagaccctttctgtgggcttccataccaccttgaggttattttcatcatgaggtagtgtagctatctgtttacctgtccacctctttatccaaactgtggagtacttaagttgaggatgccttttgtctctgtatctttggctcctaagacagtggctaaccaacatatccaagccatgcaaatgtttttccatcaatgaatggttgttcatccaatacttgaacagtgaaagctataggcgagattcggtgtgttctgggtggtatggccatagatgggaaagctatgggaaacatagttgttcatgtgagggagtcttctgcaaaaaatattctccatggagtgagcatggtggtgtggggggttctggttgctcaccattgttttgaccaagggcccacatgcgagggcacctccaggtgtcttctgctttactggattggatgggagcttttctgagaacattctctgaaatggatgctcttcctttgaattctgtatttggattactgtctctactttcctctgggtatcatgtcatgcctggaaatactcttcaaaattactcagggttaacctttctgtccctcttcatctttttcaagcagcctgtgattccctggttgacactgtgttcaacaccgtgtggaccttgggctgccgcccctttatgaatagtcagcgggcagcttgcatctgtgcagaggaggagaaggaagagttatgaggaagaagtgattccttcctggttttgagtgacaccacagctgtcagccttcaagatgtcaagtcttcgagtcagcgtgactcattcrttcttccaacagtttggacaccacaaagcaggagaaagggaacatttttctacagctggaaagtgagtcctatcctttgaggaaatttgaaaaaagacatggagtggtttgaaagctactcttcatttaagactgctctccccaaccaagacacatttgcctggaaattcagttcttagcttaaagactaaaatgcaagcaaaccctgcaattcctggacctgatagttatattcatgagtgaaattgtggggagtccagccatttgggaggcaatgactttctgctggcccatgtttcagttgccagtaagcttctcacatttaataaagtgtactttttagaacatttggaaagagatgaatgaattccattatcaccaatgtgcttccatttcacttagaagagaccaaaactgaacctggtaagttccaccaatgaccacagttattcccactgatgctaaacagagaaaaacaggtgggcaggctcagaggcttacctgattaaggccaacggaggggaaggtcagatggaattaggtctctgaggattcatttttccctccggtgacctaccccattggtattcccagttactaaatggtgttagagtcatgctaagatctgagatgtacttgctaagagttactgatggagctagctaggaaaagtccctgcagcctgtcgggagtgagagacaagtggccattccctaacttgcgggtctcaagcctaactatggattagaatcacctgaggatcctttaaaacaaaccagtaaatatgcactggtattttataaatgttttccaggtgattctgctgcacagaagggctgggggccactaatctagagcaggaatcggcccagtcccgtgggccaagcctagcccaaagcctgttttgttgttgttgctgttgttgtttgtttgtttttttgagacagagtctcactctgtcgcccaggctggagtgcagtggccatatctcggctcactgtaccctctgcctcctgggttcaagcgattctcctgcctcagcctcccgagtagctgggattacaggtgcccaccaccgcgcccggctaatttttgtttttttagtagagacggggtttcaccatgttggccaggctggtctcaaactcctggcctcaaataatctgaccacctcggcctcccaaagtgctgggattacaggtgtgagccaccacacctggctcaaagcctggttttgaatccttttttggaataaccatgctcacatttgtttacatattctctgtggctctccttgcactacagctgcaaagttgagtagctgcgacaaacactgcagggcccagaaagcctaatacatttaccagttggcttgttacagaaaaagttgctgacttctatctaaatctttttctcctttcccttacttttgttaattttactgattctactaagaactattaattgtagcaattttttttaattttttgggatttggggggttttttgaaacaaggtctcactctgtcaccctggctggagcactatcatggctcactgcagcctcgacctcctgaactcaagcaatcctcccacctcagctccctgagtagctggaaccacagtggcacaccaccatgcccggctaatttaaaacaatttttttgtagagatgaggtctcactatgttgcctaggctagtcttgagctcctgggctcaagggattctcccaccttggcctctgaagtgctgggatttcgggcatgagccaccaagtccagactatagcaacttttaaaaactaaaagcagaaaaacttttctgatcttatgtaaaggccataaaattaattggcatataaagaaattggagttaactgcagataatatttatctttgtggtttatatttatttcaataaaacttcttattattaagtacctacaaaacagaatatggcagaattatatacttttttctattgtcttatcagcctgagggcacagaataccaaatcacagggaacatggtaccaaactttaattctgttacagctcattgaagcacttaaatacatgttgatgaatttattaatatttgttaggtgaaaatatttcacttaaggcaatatattagaagtatcaaaagatggccgggtgcagtggctcacgcctgtaatcccagcactttgggaggctgaagcgggtggatcacctgagaccaagagttcgagccagtctggccaacatggagaaaccctgtctctactaaaaacacaaaaattcgctgggtgtggtggtgcatgcctgtagtcccagctactcaaaaggctgaggcagaagaattgcttgaacccaggaggcagaggttacagtgagctgagattgcgccactgcacttcagcctgggcgacagagcgagacgccatctcagaaaaaaaaaaagagaaaaagaaaaaaaagaaaatagtatgcaacagaaaaaccaaatactacttttaaaattatatactgttttattgatacacttccaaattccctataattagtctgcatttgaattgaaatttcaaggtataactataatttacatatttaaggagtcattgggtatttaagtcataatttcagtaactgtttaatttttctagggtttgtaacttgaaatattatacccagcttctgattttgtggtctgattgcaccatacacgaggtatttaagtgtaggaaagaaatgagggaaatggggtgagtgtctttctgggtggacagtttagttttcaaccctagaaagatgaaaccccacccaggccacattgttcagcagtgctgtgacctgtgcccactgaatggaccagaatcagagtgagttggtgctgggagtctgaactcacagtgtgaagtctgaacccagctgttggcagatgttcttagagggcggtggggggagaagctccaaagagcagagccgtccaatgcagggactcgaggtatggctacgaactagtcctcccagtcgatgcggatcgggccgcctgttagcgtctggccctgtagaccggctgagtcctctcctcctgccccacgacgcattcgccggtggcaaccctgggcacagcgggaacgctcgtccaacactccacagacaagaacccggcagtgcagaaacacttcctgaagagatgatcacgactgttaataaaaacaataactgctgccacttgtggggcacttacaagacacaatactaaatgttcctaaacattaagtcatgtaatcttaacaaggacatccacaagtagagtttatcatccccattttacagataaggaaacagagaggttaaggaacttgcccaaatgtacacatttaataaaaaatgtggcaaagtttgcatttaagtcacatgagtgattaaaaaaacccacattcataactcctgcatggagctggaacagaagagacctttgtgaagcaacatctactaacttgagcatcttccttcttcacaccaaggtctggggatagcattggctcccatgcacttgtgctgtcaaataaccagtgttttctgcaagcacctttctgtaggtaactgcctgagcttcctgcctgattgagggcaatcaggatcagccatcattgttagcagttgttctgtaaccatggtatagctgggatggacatgcatatacttacaagcagtgtggaaaagaatgttggcctcttcaacttccttttgtttaaatgtttcaacaagtacactctaacaacaatgataaaaaatcttccagcttatctcactacattaaatgtaatatatttaatatgcctgtaaattgttatgacaacagtttttatgtctgcttttcccatatttatcattttaataactcttaatattgcattaaattgatatactgtggcccttagccctgcttgtttggggctttttcttttacccccttgtaacaatgctctacaaacacttccaatacaccttgtctgttttggcttaaaaatttgttttgtttgtttttagagacagggtctcactctctcacccatgctggagtgcagtggcctgatcatagctcactgtaaccttgaactctgggctcaagtgacctgcctcagctgcctaagtaagctaggactacaggtgtgtgccactatgcccagctaattttaaaattttttgtagagtagaggtcttgctatgttgcccaggctggtctcaaactcctggcttcaggcaattctcctgcctctgttttgttttgtttttaagaaactgtcagaattggaatttttagataaaagaatatgacgattttatgattattattacagattatcagacaatgttccagcaaatgtactaatttacactgtcactgtatacttctccctataaccttgtaagtgttgtattttataattttcataaatttaatatgtataaaatggtgtcttataattgttttcatcagcacttaagtactattttcagtgaacatttcactatttgtcttttctgtgaatttcctgtccatatcccttgccatttgaccaatcaccacactggcttttcaaccataactgcccacaaagattttaaattaaattatgatcctatagtattttctttgaacagcacagttattttggcaggtggtatgaggggaacagcacagttattttggcaggcagggcgggtgtgacatgcatgaaagggttaagcttctcgatggccagtttctctgtttttctcttgagcccatgcagatcccaccagtgggctcttggaatgtcaacacactgggacaccaaaaaaaaaaaaaaaaaggctcaggttcaggggttataaattaaagatgttcaactcaccttgtggtctttgcccacaaacttgaagacagggacctggaagtgctttgctaggtgatcccgggatgtgtactgctttaccgagtcatctgaaacacagctgaaagtagggcagatagcacataagacttgattgtttcaacagaggtggaaaaacaatctaacccaacattttggcccaaggagagccaaaggggtggaggaggctggactgtactcaagctttttgggaatgaaagaaaaattaaatttttccctgtgaaggcctcttcagacctagccttatttactaatagcatctgtcccatttatcatttgctgtacccacaaactgggcaccagggcttcctgttaagttaatgcgtttaagtgttggcaacagcaacaccatttatttcagataccttttgctagtaaggctgtctttccatttgcaatatattgcaggaattctgcctctatgtaccttagtattgatttgagaaggcttttctttaacaaaatttattaactatgtattggacacctaatagcaactgactactgaaggggatacaaaagttagggaactgcagtgcatgcatcaaagtgacataaatatccaagtttcttagataataactggttctattgggtaaaagtcatgcacctccaaattgttttaatttctcttttcccaaatttaatgttaaattgcagtttgatagggttttggggttttaatctcaggtctactgcttaaagcaaaacacctaggttcacttcagggttagctgggggaaaagaagcactcctggctgggcgaggtggctcacgcctgtaatcccagcactctggcaggctgaggcaggaggattgcttgaactaaggagttcgagaccagcctggccaacatggtgaaaacccgtctctattaataatacaaaaagttagccaggcgtcatggtgcctgcctgtagtcccagctactcggcaggttgaggtggcaggattgcttgagccccagagttcgagattagcctgggcaacatagcaagaccttgtctctaaaaaaaaaaaaaaagtcaagtgtggtggtatgcctctgtaatcccagctactcaggaggctgaggcacgatgataattgcttgaacctgggaggcagaggctgcagtgagccatatttgccccagctgaggccaaagttttggatattcatgaaacttcttataggccaagaatcaccctcatattatttttcccattctagattctagaggaactttttttttttttctggacatagttgccttttagtgggtacctaatagttcctgtcttctgggccaggaaaaaagtggaggtcagatattaaagccgattaaactgggtacttgctccacatgcacaggccacttctttttcttttcttttcttctttttttttgttttgttttgagacagggtctcactgttgcccaggctggagtg

SEQ ID NO: 94268 - DNA, 101661 bp, Homo sapiens
  misc_feature (1)...(101661): n = A,T,C or G
ccacatgtctgctgacttggcattcacaggtaaacccatcctcttacactgagtttttcctctgttaaaggtaaataacataaggttactccattgcttaaaatacttcaatgctttcccattacttgttacagtacttaacaggtcggcatgacctagcttttgcgtacctctccaatctcctctcatatgggttccttccttccttactgcattgtagccacattgaatttctttttttttttctttttctttttcagacggagtctcgctctgtcacccaggctggagtgcagtggcgcgatctgggctcactgcaagctctgcctcccgggttcacgccattctcctacctcagcctcctgagtagctgggactacaggcgcccgccaccacgcccggctaattttttgtatttttagtagagatggggtttcaccgtgttagccaggatggtctcaatctcctgacctcatgatccacctgcctcagcctcccaaagtgctgggattacaggcgtgagccactgcgcccggccccacattgaatttctttagctcctcaaatgcaccaagttgtgtgtgtgtgtgtgtgtgtgtgtgtgtgtgtgtgtgtgtgtgtgtgttgctacatggacctcacatataaagacacacagtaatattctctctctctaaatgttcttattcacacacttcatctagctaactcagttctcagtttaaatgtcatttctatagtgatacttttcttgtgatatcaatctaagccatgtccctcgccttcttctttcccagagcaccctgatgatttcatttttttttttttttgagacggagttttgctcttgttgcccaggctggagtgcaatggcacaatcttggctcactgcaacctccgcatctggggttcaagcaattctcctgcctcagcctcccaagtagctgggactacaggcgtgcaccactacacccagctaatttttttttttgtatttttagtagagaccgggttccaccatgttggataggttggtctcgaactcctgacctcaggtgatctgcccgccttggcctcccaaagtgctgagattacaggtatgagccactgtgccccgccaaacatgtttattggccatatatatatatatatatatatatatattttttttttttttttttgagatggagtctcattctgttgccaggctggagtgccatggcacaaccttggctcactgcaacctctgcctcctgggttcaagcaattctcctgcctcatcctcccgagtacctgggactgcaggcgcgcaccaccacacccagctaatttttgtatttttagtagagacggggttacaccatgttggccaggctggtctcaatctcttgacgttgtgatccgcctgcctccacctcccaaagttctgggattacagttgtgagccaccgcaccaagccttttttttttttttttttttttagatggaatctcactctgttatccaggctggagggcagttgcatgatctcagctcactgcaacctccacctcccggttttaagtgattcttgtgccttagcctcccgagtagctggaactacagacatgcgccatgatgtccatctaattttcatatatatatatatgtattttttttttaacagacatgggggtttcaccatgttggccaggctggtctcgaacttctgacctcaggtgatccacccagctcggccacccaaagtactgggattacaggtgtgagccacacctggtttccttattattttcacttgtcaaatgtgtatgtacgtatatttgtgtgtgtatgttttttaatgttgtacatacatactttttttttttctttttcactctgttgtccaggctggagtgcagtggtgtgatctcagcttactgcaacctctgcctcccaggttcaagcaattctcctgtctcagcctccagagtagctgggattacaggtgcacgccaccatgcctggctagtttttatatttttagtagaggtgcggtttcaacatattggtcaggctggtctcgaactcctgacctcaggtgatccacccacctcagcctcccaaagtgcttggattacaggtgtgagccaccatgcccagctgaaacatacatttttatgttgtaggttttcttcaaaggactccaaattctacaacagcaggaatcatatacccagcacttaccatagtctggcttatatgggcaggcaattatttatggatgaatgaatttctattgccacagtgcaggttttaattcttttcaacaaagattataagctccttaaaagcagagattgtctaattaaagtttgatcttccacagctcagtaggcagtgtcttggacacagaaggtaggtgttctataaatatttattctatgaatcttgaattactaacctagactctctttctcttctaattcacatagcatatgtgattgattaaagttcacaactcattgttggtaatgtcatataaattattaggcttgttgtccagttttgaaaaatctccaataagctatttatttatttagacacaggatctctttctgttgcccaggctggagtgcagtagtgagaccacagcttgctgcatcctatatcctgatcctctagcctcagcctcctgaatagctgggactacagacacatatcaccacacccagctaattaaaaaaactttttttgtagaggtaaggtctcaccatcttgccctggctggtctcaaacttctggccttaatagatcctcccacctgggcctcccaaagttctgcaattacctgggagagccaccacatccggcttccaaaagattatttaatatatgacttaaaaagagttcaggacccatcagatttctttaaactaatgacactctttagtttgttgtggatgtcctcatcaagttctgagaaaaaaatataaatttcttttttgggcagggccccacagctcatgactgttattgcagcactttgggaggcctaggtgggaggattgcttgaacccaggagttcaagaccagcctggacacatggtgagacctgtctctgcaaacaaaacaaaatcctacagaaaacccggacatggtcgtgcaggcctgtagtcccagctacttgggaggtgggaggatcgctggagcgcagtagttggaggttacggtgagctatgatcatgcaactccactccagcctgggtgacagagtgaaaccctgtctctaagaaaaaaacaacacttttttggctaggtattgatgaatgctaaatctttacaattttacacatccaataattggaataatttcccacagattagcttcaggttcccaaaatttcaaccctgcttctcttctactattcacatagtttttgatgctagaacattggacacattaaaataacttcaagagttctggccctgcacctttgttttgcaatgctgggtggatcagcacaacgggcaattggagtattcttggaagccactgggacagctggcaatatcttaactacacatggaagtgactgtgggttataaaaatatatcccagtaaattcaaaccaaatgtattcctaactcaacttccctttagctaaatttcaaaaatgtttgcttgccactccaacactagacaaagggaaacatggtggagggaagtcactaaggactaaagattgcagtttaaaatacattacttttataaattttacagaagcataggacagtgtgaacatattactagggacccttccagggacttggaaagggctagtgtaaatgagggcacctgaagctgaagcctccttagcttcacagtaaatctgcttcagagtctacggccattttaattactgagtaaactgtcaactttcagagtcagctctatgtagggctagtgaatatgttgattacagctccatttgaggaagtttttttttttttttttgagatggagtctgactctgtccccaggctggagtgcaatggtgtgatctcagctcactgcaacctctgcctcctgggtccaaatgattctcatgcctccgcctcctgagtagctgggattacaggtgtttgccaccatgcccagctaatttttgcatttttagtagagacagggtttcaccatgttggccaggatggtcttgatctcctgaccttgtgatccgtctgccttggcctcgcaaagtgcagggattacaggtgtgagccaccgcacgccctgcctctttggtcttataattactttatactcctaaaaagtattgaggactccaaaaagcttttatgtggatcatatttatcaacatttactatattaggaattaaaacaaacatataaaatatttattcatttaaaacaacaataataaacctgttacatgttaacataacataaataactttttttttgagagagggtctggccatgttgcccaggctgatttcgaactcctgggctcaggtgatcttcccgcctcggcctcccaaagtgctgggattacaggtgtgagccacttcatttggcctaataacatatttttaatgaaaaataactattttccaaagcaaaataatttagtgagaagagtggcattattttacatttctgcaaatctcttcagtgtctgggctaatagaagattctcatatctgtgtctgcgttccatctgtatcacaggcatgtagtctctggaagacctcactgtattgttattagagtgaaaaaggcagtaagtcttagtatgaaaataaagtcttagtatgaaaataattttgaccttatggattccctgactacgctttcagaaccattgatttagacatcattatatctactttttagttgcctagtgctcccagagtaccctctctctctttctgtagctatataatcactcacctcctgcgtaagtcaaatgttaattattgctatactttttagcatacatggaaaactttagaaaccacaattcttaatgaataacaagtcttagcaactcatttttctctttaactgacaaggaaaaaattatcttcttcattgtattctccctcatagtacagggagatataaagaaacccttggtttggggttactttataactaaggcaaatgttagactaagatcaaacgcaacattgggtgccttatataaattaatgttactggagaatctaatatttactaagtcatttctgtgtgtgaggcatgtgttaagtgctttacatacattatctcattttattctcacaagaatcttacaagatgggtagtaccgtcatttctattttacagatgagtaaacggatacggagaggttgttaatgcctagtgttacacacaggattgaggcaggatttgaattgagataacctgaccctggagctcttagtctattatctactgataaggtataaaggtaggagatagagcacgattagtataaaatgagtgctgagatgtgagaggaacaagacagctgagataccaagactgaatctctattattttccaccctagaaaaattctgctttattttctacactcccacgttcctcttctcatttttaagatactttattgccggcggcctcgtcgcttaggcctgacgcggaccctgaaatcaaggaggcaaactgaacaggagcgggggaaaccccgtggtaaccacggtaacggtggcggggcgagaaccctgcgcaggcgcgttacatcccactcccgcttacccacaccacggcggccggtcccagccactcctctcggcctcagactccacgggccggccacgggtgggggcagcagggaggcacgggcttggcgcctgcgcagtcgccggggcgctggtgtgatcgagctcacgtagcgagggctgcagtcgcctcctccctggcgctgccatcgcggcctagaggttataaaagggctaacgggctccctctgctgcccagtcgcgccgccagcgggctgagggtaggaagtagccgctccgagtggaggcgactgggggctgaagagcgcgccgccctctcgtcccactttccaggtgagacgctccctcgatcccggagactgaggccactgggcagccgtggaccttctcggacggctgcggcgatccattccttcccgctgtggtggtacttctggggcgggggttccccaggttaccacagcagcctcggttccttcccctcgggagactcggcccctctccctgcgccacgcgactcccggcgcccgcgctccttcgtgccccccttcccacctctgtccctagtgcgcctcggaccgctggggctgctgcagcctcagtccccgccctagggaccaggactttcttgaattttccttyccggggaggaatcactctgttgcttttttttttttccaagttcccctgcacctggtcctccctaacgaggctaaggggaacgcaagcgcggggcgtgggcttttggccgccacagccgcagatggttcgcatgtggcggtggagagcggattttaaggcttggagctggatccgcagcgcgccaggcatttttgccctatcgaaagtcgccgggagctggggggacctccccagaaagttccggctgaactcatctgttgcgcgcagcggtgcagcattagctgccagacgtagcccggggcgccgagctttctgctcgtagcgccgaggaagtaggctctcaggtcacctcgtcgtcagggaagcttccttccctcttcttccccataactttttttaaaaagagacaagagctcttctctcaatctctgtctctctgtctctctctgccgagaatttgcagcttttaaaagtccacatcagtccaacaaattccatggttgtgtgaggattttgagttggattacatggctggcccccggatgtatgtttcaatggggaggaaggatggtatgataactgtgagactctttctcctaaataatcgactctgttacatacaaattcaatgtttagacactaacatcttacgcgttccggatagagtgaagactcttggaattttgcactgttttctttaagaaagggttgaagaagcagctagatcctcttttaggaattgatctaaaaggccaaagagacttgccaatttccacttaactgtttctggtttctccgagagcagtggttctcggactttcgcttggaatgcactcggaggggatgaaatagccactacgtgaaggggggaggggcaaagacgtggcagcagcgttctttcatcaattttttactcttttttttttttttttttaaagttctggttagaaacgtatttccccttttaggtttagacgtagcttatgaatgaggctagtcttttcctaaaataatcagatgaagaattcagtctgcatagcaggaacgttggaagttaatttaaaaaacattttaaagggatttttagaatcaagtttctatggagaaaatcggtatcctaagacgatatattcaagaagctgaaagtgaacaacctcaactatattttgtcttcatgtgaaatgtgaatacacaccccgtgatttttttttttttttttttttttttttagcttgtgagcgtaatttaagaatctgaaatgtgaacttcaaattttacttttttctttatgtgggaaaagagactttatcacttacctttaataaaattcatagtcagttttggttttgggacattgtgccttaagtcctgccattgtttttgatagctgatgacaaatgkttcttagatttacatagactaactaggaaaaggactatttctgtctcttttaaatgggtagtgctgtttttattgacattttgaaatgagttttattttgaagtactgaaaatcaggactttggtaggcggataattacattggccattttgtgttttggtaacttagatggtaaaacagttgaaaaatgtgtacaacttttaattatgccaaaaaaattagtgcaaaagactattgaaaaaaagttttatattgccttgtagtctgggttgttgcagatgaatcttggctttttggcaaggagctgttaaccttttctattagtgcagaataagttgtatactgaaaagcagtgtttttcagtagggcaattaagttcaaacggcatttattccagagatgcagcaagagctgggacagccataaagcttgtgagccttcctttctgtggaaggaatgctttattttacttagcaaccagttatcaactaggatataattattgctcttgaattgacctgtgagatacataatagtggttctcaaactattttaaggtcatgaaatcctttgagaatctgatgaaaggtgtggtcctatgtcagaaaatgcaaatacaccctacatggaattttgtatgtcacttcctgcccccccactcaagtccattcatgaactttattataagaacccctaaaaagtaagagatgtgaagttactctctaagggtatctaggtgtcttgaggcagtattgaatgtttctgaaaatcgagctgggcatgtaagtctgactggacttgtatatgtgggtgaccctaatacatttttgccaaaagggttttaacaaaagttaataggttgttagaattgttgaaatgctaaattgtctagtctgtgaaagtatatcacattgcatgccctctcctatatatggtaacttaactttggttttccattctgaaagtggaacaggcttggaagtaaacaaaaataaattgcataggctcttggcattaaactttattgcttttcttgcagtgagatcttgaatcttgtaattaaaccataatgtgttgtgtgtgtataaatatatgaatatatataaaaaatccaaataaaatgagtatgtgtgtgtgtgtgtgtgtgtatatatatatatatatatatatatatatatatattttttttttttttttttttttttttttttttgagatggagtttcactctgccacccaggctggagtgcagtggtgcaatctcggcccactgcaagctccacctcccgggttcacgccattctcctgcctaagcctcccgagtagctgggactacagccgcccaccatcacgcccagctaattttttgtatttttagtagagacggggttacaccgtgttaaccaggatggtctcgatctctttacctcgtgatctgcccgccttggcctcccaaagtgctgggattacaggtgtgatcacgccaccgtgcccggccaaagctttgtgtttctattcaagaaaatttatttgtataaattgaagctgtcctgtcattaggacagcttcagtttctctagttgaataagtattgtacctaaagaaaagctttggcaattcaaaaggactctcatttaggttactccagcagtttttaaactcggtgtggtgaaaaacattctttttcctggtcttcctttggatgatcagtatgactgttagtatatttgatttgacatttgctaaaaatacattatagagattcagacttcttacctagttgtcatcagtgaatgagttctatattgggcctttctcttcctcatgtttagtgtttcataaaaatgtgtccatattactcatttctttcttaaatagtaatattatgtggaattagtacactcagccttactctctcttttttttttttttttaagagataggatcttgctctgttgcccaggatggagtgcagtggtgtgaccatagctcactgcagccttgaactcctgggctcaagcaatccttctgcctcagcctccgggtgtagctcggggtacagatgcatgccaccatgtctagctaattttttaattttttgtagagatgggatcttgctctgttgaccaggctagtctcgaactcctggcctcaagtgattctcccatctgccccacaaagtgttgggattataggtgtgagccaccatgcctggtcatccttactctcttgttggacacttgagctgtttctccattataagtagtgcaaagagaggactgtaatttagtggtttattttatcaacctgtataattacagtaaactttaaccaattttttaatttttaaatttatatttaaatttttttttttttagagacagggccttactatgttgcccaggcatggtggctcacacctgtaatcacagcactttggaaggccgaggcaggaggatcacttgaggccaggagttcaagaccagcctggtcagcatagtgagaccccatctctctacaaaaaaaatttttttttaattaagggggcatgaggttgcatgcatctgtagtctaactacttgggaggctgaggtgggagggtcgcttgagcccaagagttggaagctgcagtgagctatgatagcaccattgcactctagcctgggtgagagtgcaagaccctgtctctaaaaaaaaaaaaaaaaaaaagaaaagaaaaaaaaattatttacaatatggccagtagactgtaggaaaatcaagaatgatgagaaatgtttcataggagaagtaggacataaaaattacatgatatagcaccatgtggctaacattttactagatattaaatctgtagcactgaatggaaatgcatatctagattcacatcctctacaaccatgaattcatttttccctgttctagtatacatggtcttattttgtctctctttacctcaacttgagaaatttggatctggcattagagtaaacagataattgaagactagaaagaggtagactgggtggaaataaaagtggaattttgacagaatagccttgggagggatgaagctgagtatacctgggcctcagagcaataatccattttttaggaggaaagggactgctaaagccagcttttgagtattctactctgacctgagtggccttggtctgaatagctcatgttcagagataagagtatatttaacttttttgtactaagaatagtatttgagtaatgttataggtacatatgagaatttggccttcatctctgcmgagtcagttaaacacaagtttctctagatatttccattacaagaatcaaagctctttgatttttggaacttcagtaaaacccaagaatgaatagccgagaactatcatacaagtcataaaattaaaaggcattgaacagtgtatgaagcatcagatatcctgttacatgtgtctgcaacaataaattaaatattgattaactgattttaagtaggctcaagacttctcttacagttctaatcttatattaactagatttgcatatctaatttctccaaaaatatgatcaagaaatgtttattttagtctaggcgtggtggctcacatctgtaatcccagtgctttgggaggctgaggtgggaagatctctggagcccaggagttcaaggctgctgtgagctctgattgttccactccactccagcctgggtgacagagccagaccctgtctcaaaaaaacaaaaaaagttggtatttctaaaacctactggttgaatttaggacctcaaaatgttacttgtgtgtgtgacctttgttcttgccctatggttctgacaaccttcctcctttttatttatttatttatttatttatttatttttttggtaaactcaggcaacatattcatagtcaaaggttacatgaagacattctcaaatttacatgatttcaaaatttagttacttcttttttttttttttttttttttttgagatggactctcactctgtcacccaggctggagtgcagtggcgcaatctcggttcacggcaacctctgcctcctgggttcaagcaattctctgcctcagcctcccgagtagctgggattacaggcacccgccaccacgcccgactacttttttgtatttttagtagagacagggtgtcaccatcttggccgggcgggtctcgaactcctgaccgggggtgatccatcagcctcggcctcccaaagtgctgggattacaggcatgagccaccgcacctggcctgcagttacttcctttaacctcaaagatattttgaaaatagacctcaatttactatgcctgaatttaaaaaaccttaatattgtatttgaaaatagtgaatagtgaccattgccaccaagtagagtgatagtaataagtaaaacactaatctttgatataagggtgattactaataaattgaataaactgatatattttaacgactttattgagcaaaattgacaggacaaattgcatatatttacagtgtacaatttgataaatttgacaaaaatatctacttaaaaaaatatcagtacaatcaagataaggaacatatccatcaccttcaagagtatcctcaaggtcaggcacagtggcttaggcctgtaatcccaaccctttgggtggccgaggcaggaggactgcttgagcccaggagttccagaccagcctgggcgacatagaaagacttcatctctacacaaaataaaataacattagctgggtgtgatggtgcctgcctgtaatcctagctacttgggaggccgaggcaggaggattgcttgagctggggaggttgagtcttcaatgaactgtgattgtgctactgtactccagcctggtgaccgaaatgagtctctgtctcaaaaaagagtatacttggccaggcgcagtggctcacacctgtaatcccaacactctggggggccgaggcaggaggactgcttgagcccagaagttcaagaccagcctgcgcaacatggtaaaaccctgtctctacaaaaaaattaaaaagccaggtgtggtgttgtgtgcctgcagtccccgctacttgggagactgaggtgggagactcacccaaagcctggagattaaggctgcggtgagccaagatcacgctactgcactctagccggggcatcggcagtatccttatgactttttgtaatcccttcttttgctccttactaccctctctgtatccctaggaaaccattgtttcctttctgttgcttaagattagtttttattttctagaattttataaaaatggaattgtatatacgctttttttttttttttttagcacggggaatctccttacactcagcataatttgagattcatccatgttgttatgtgttcatagttttttattgttgaatagtattttattttatgaatataccatgattttttttaacccatttaccctttgatggacatttggattgttttcactttttgactattatgaataaagctgctatgagcattcatgtacaagttgttggagagagatatgctttcttttctcttatattaatgcctaggagtgcaatagctagatgtgatagggaaatattttttcccagttgttggcttgtcttcattctttaaacagtgtgcttcaaagagcagtttctattcacagacaacatgtctgtgactcttcaaaaaagctctagtgaataggttaattcagcagagttgtagcttagaaggtcaatatacaacagtaaattgtatttctatatactaataatgaacaattagaaactaaagtgaaaaattcccatctcattagcactaaaaaccatgaaatacttaagtattaacttttcaaatggtgtgtaatatttgtatgttgaaaattatgaaacactgattatatcatgttcatggattagaagactcagtattaagatacctactcttctcaaactgatttatagattcagcacatttctagtccaaatctcagaggatttcttatagaaattaatgagccgattctaaaattaatatggaaaaccaaaggaactagaaaagctaaaacaattttgaaaaagaataacaaagttggaagattcatactacctgatttcaacttagtttaaagctgcaataaccaagactgtggtattggagaaaagatagacatacagatcaattgaacaaaatagagaatttagtcacacaaaaattgtcaattcattttgaaaaagtttaagggcagttcaacagaggatagtctggaacagttgaatattcatatgcaaagaaaaaacaatctttgttttatttgggcaccaagtatccactgttggacactgggcagtcccttgcccaggaatttatgtgaatattgggacaagtgacatgaatccaccagtggatatgaaataaagtttaatcacacagtaaacagcaaaaggactcctcaaggtcaaggacttaggtttagtccaggatgaagcaagagtgaaacagggtgggtggctttggtttttattgaccagaaggtggaacttgtttgatggtccccatgtgtggtatttacatggtttcaacttcacaccagtaccaagggagggaatactggtccccaagtgtggtatttatatggtttcaactttacaccaataccaagggagggagtacctgggctttcttacagacttacccagatgtgggacaaaagggagagaggtgtgggacctgaaggcaatctgcactcaaacatcaaaatgaaatctttttattagagcctcaatctgtacttgacactgtatgcaaaaattagttcaaaatggttcgtaggccgggtctggtcgcacacgtttgtaatcccagcattttgggaggttgaggcaggaggattgcttgagcccaggagtttgagactagccttggcaagagtgagacccgtttctattttaaaaaatgttcatagattgtgaagtaaaatgtacagctataaaatatttgaaagaaaacataggacaaaaatatttttgaccatgggtcaggcagagatttcttggacatgatgccaagaacatgattcataaatgaacaaactgataaattagacttcatcaaaattaagaaattctgctcttccaaacacactgttgagagaataaaaagacttcacagactgggagaaaatattccccatcacatatctgacaaaaaatagactgtataaggaactcaaagctgggcatggtggctcacgtctgtaatcccagcactttgggaggccaagactggaggattgcttgaaaatccaggagtttgagaccagcttgggcaacatagcaagaccccatctctattaaaaaaagtaaacaacctaattaaaaagagcaaaagatttgagtagacactatgcaggaaggtgtatgaacagcagataaacaccccaaaaggtgttaaacataggccaggcatggtgggtcatgcctgtaatcccagcactttgggaagctgaggtgggtggaccatctgaggtcaggagttcaagactagcccggccaacatagcgaaaccgtctctactaaaaatacaaaattggtcaggtgtggtggcacgtgcctgtaatcccagctacctaggaggctgagacacgagaatcacttgaacccaggaggtggaggttgcagtgagacaagattgtgccactgcattccagcctgggcgacagagtgagactctgtctcaaaaaaaaaaaaaaaaaataaaggcattaaacatcattagtaattatggaattgcaaattaaacccataatgagatagtactatatgtctattgtgaaaattaagatattaagagaaactaaggaaaaaacggcaatacaaaatgctggtaagaatgggagcaatggaaactttcatcctttgctgttggaagggcaaatagtgtagctactttggagaaacgtttggcagttttttatgaaggtaaatatatacttgtcatatgacccaacattcccgctcctaggtatttacccaagtgaaatgagaacttaggttgatttcctcttttttttttttttttttttttttttgagatgcactctcactcttttacccaggctggagtgcagtgacacaatctcggctcactgcaacctccacctcctgggttcaagcaattctcctgcctcagcctcccaagtagctgggatttacaggcatgtgccaccacgcctggctaatttttgtatttttagtagagatggggtttcaccatgttggccaggttggtcttgaactcctgacctcaagtgatctgcctgcctcagcctcccaaagtgccgggattacaggcgtgagccaccgctcccagcctgttttctttttaatttttttaaaacagttttattgagtaataattcacgtaccatgcaattttccctttaaagtatacatttcagtggcttttaatatattcacagttgtgttaccacaacaatcaattttaaaacatttatatcactccaaaaagaaaccccagagccagtagcagtcactcccattgtcccttgcctaaccctgggcaaccactaatctactttttgtttctagagattattttacttaatgttttcaaggttcatttgtgttataacatatatcagtacttcatttctgtttatagccaaataatattccattgtacggatagaccacactttgtttacccactaatggatatttgggttatttccacccttttggctattatgaataatgctgctgccgtgaacattcatgcaaaagtttttgcctgggcatgtgttctcatttcttttgggtatagacctatgagtgaaatatctgggccatatggttattctgttcagcttttttgaggaactaaactgttttccagaccaactgcctcattttacgtttttaccagcaatgtatcagagttccagtttctctgtgtccttgtcaatacttgtaattgtgtgtcactttttgttttaaagagatgaagtcttactatgttgcccatgttggagtacagtggccattcacaggtgcaatcatagtgcagttatatgctcaaactcctagactccagtgatcctcctgcctcagtctcccaagtagatagaactacaggcgtatgccactgtacccagctagtcattttttactgtagccatcaaagtggcagtgaagtggtatctcattgtggaattgatttgcattttcatagtgatgaatgatgttgaacatcttttcatgtacttgcctctttggagaaatgtctattcaaatcctttgcccattaaaaaaaaatcactggccgggtgcggtgggtcactcctgtaatcccagcactttgggaggctgaggtgggcagatcacctgaggttgggagttcaagaccagcctgaccaacatggagaaactccgtctctgctaaaaatacaaaattagccaggcgtggtggcacatggctgtaatcccagctactcgggaggctgaggcaggagaatcgcttgaacccaggaggtggaggttgcagtgagctgagattgtgccattgcactccagcctgggcaacaagagcaaaactctgtctcaaaaaaaaaaaaaattattgagttctaagttctttatatatttggatactaaacctgatgctatcggaaatgtgattcgcaaatacttttttacattgtcttcgctttcttgaagcacagcagttttagattttggcaaagttcaatttatttatttctttggcttcttggtgctttaggcgtcatatctaagaaactattgcctaggcgttatgattaattgcctaatccaaggttatgaaaataatttttttttttaaatgagatggactcactctgtcacccaggctagagtgcagtggcacaatcatggcttatagtaccctctgcctcctgggttcaagcaatccttccacctcagcctcctgagttgctgggactataggagcatgccaccatgcccggctaatttttttatttttttgtaaagactgggtttcaccatgttgccaaggctggtctcgaactcttgagctcaagtgatccttccatcttggcctcccaaagtgctgggattgcaccttggtggcatgagccaccaagcctggccagtttattgtcttaaacttcaaaatggtcttaatgtgttaattttagggtaaatttacagttatcttgtttattcccaggtaattaagtgttgctgttgcaaatgagctttttaaaattgtttcctgtgattggttattctttgtatataacggtcattttctaaagagaatgccagtttttttccccaaatggtcatttttcaagtagtataactgctatataaaattcaatcttggtctgggcacggtggctcacatctgtaatcccagcacattgggaggctcaggcgggaagactgcttgagactagcctggaggtggagttggagactagcctgggcaacataaggagatcccaactctacaacaaataaaagaaatttaaaaaattggccggtcgtggtggcacaagccctgtagtccaagctactcaggaagctgaggtggaaggatcacttgagccctggaggtcgaggctgtagtcagctgtgattgctccactgcactccagactgggcaacaaagccagacccccaaacaatacaattagtcttgaatgaagtttcatgaaaacttctgaatttggaattgtttgccttacttaacttcataatttatatttaagtttaagaaatctaaagtgcatattgtacaaaacttttaaactttttacttgtatccttagggtggtgaaaaaaccaaagctgtcttatcagaacttcttgtttaaatcaaaaataggtgaaatttgtttgggaacaaaagggattgatggtggtattatgccagctagaagcagagctgtggaattcatcatttgggattttgctaactctatgatttatctatttacttaaactttgtttttttgttagcttgtttatttacagaaatagaatttttttaaattaaaaatgtttatcaaagaagtgtagatgttgagggaagagaaaaacaactgtgattccacctctcatttaacatttttttgagttcttttaattattgtattaaatttaaaaaacctgttacatatgtaggcaaatatattcttttttttgagaccaagttccactctgtcacttgaactttatgtagttcaggcattcagaactactagaactttgaatagccatttggttagggataagcatcatgctgtatggggatgaattaaaggtagaatagagtgccagaaaaaggtaaaaggggtcagtttcttgaagaaagagaaaaggggtggaggaggtgtcataagcaaaacataagtgtgtgtttttgaaatgatctcatcttaacgttctttctgacaggaaagacttaggactttggaagaacttccaaaagacagcctgtgtagcactttcagttaagggcaatatcttaacttagagctgacttctaatatgaatcttgaaatgcttttcatttggaattatgccaataagtgctacaatactgctcagtacagttcactaccctagtacagaaagtgagggaaagaagctagcgtgatttctgaatttgtgatagaaaagttggtcatagcattaaagtatttgtccatcagattgtaagtactagacatgtagctcactcttcttttaagaacagaagtatgactggaattcatggagttaagtaaaaacaatggcaatttgcagagggattatagggaagaacagaaatataactaattctattagtaattactcttacttgtcttggaagatacatcctgttaagatggaaaagacatgccaagttttgacataatctgagattagtctttcttttaaaggagattgcatccattttgacccattaatttctttttcaagcttgtttgaatatttagaacaggaggcatttatattttataatttttgataaagtcataatgtcttttgggatacttgactcttaaatgttctataatgattctctttgcaagctgctttctgaatgaaggtagaataaatagaagtgagacaccataagcacattataatggcctgatttaggagcctgaatttgtggtgttcttttgtgttgaccatgaaaactgtcagaaacattaaaagtctgaaacagatttcaggaggaccaacagttgaataagggatctgtatgaggaaaaataaagttggagccttctaaaagaaggtttggaacaagtgtcgaaggttaaaagaacccctgtggaaaattttaagtgtcagagaaagtttagtttagaatatcaagcattcttggctggaccaagtgcaatggtgtttacaactaattgatcacaatgagttacaggtttctttgttttttctgcactcccattgctttacttgactagcttaaaaaaagagaatatcaagcactctttagtctgccttattaatttttgaatgatttgtctgggagatataaacttttgaaaattttacaactttttcttggaagaaaaatatttgaccaaaacgctaatagaattatttaccagatgccctgtcctagtaattcactggataacttgtacttaaaattcaatgactcctcataactcaatgtaaatatagatgctccttgacttatggggctgtgtcctgataaaccaactgtaagttgaaaatactgtaagatgaacatcatagcttagcctagcacaccttaaacatgctcaaaacagaacacttaaattagcctacagttgggcaaaatcatctaacaaagcctattttataataaagtgttgaatagctcatgtaatttattgaatattgtaccgaaagtgaaccacagaatggttgtggggtcaaagtatgttttgtttttgttttgagacggagtctcgctctgttgcccaggctagagtgtggtggtgccatcttggctcactgtaaactccacctcccaggttcaggcgattcttctgcctcagcctcctgagttactggaattggaggcacacgctaccacgcccatagtagagacagggtttcaccctgtttgtcaggctggtctcgaactcctgacctcgtgatccgccagcctccgcctcccaaagtgctgggattacaggcgtgagccactgtgcctggcccaaagtatgttttttattgaatggcatatcacttttgcaccatcataaagttgaaaaatcctaagtcaaactgtcctatgttggggatcatttgtatttactatatggtagaacttttaagatctgttcccaggtttgattgacctgttgagtctgtgggactggacttccctggaataagaactgtaggaaagttttgtgtttggatgaatgtaaacttcacatttatttttatccaggcctacctgaaaatgttttctggtaggatttcttccatactgctttttttcttatagtttaaaaaatgtaatatgctaccaaacattataagtaatatacatgtatgttacaaaaattatataataaacacttttgaacctatctaaccaataacctaaatattatcaataacttattcatactgttgcaacaccaagttttattccagtgtaagtttatctttggatctttgactcttcttgggttttcttttctttcttcctcctattcctcctccctccctcctctttgtcttyttaaaaattaagacaagtcttttcagggatgctatctgagattagtctttcttttaaaggagattgcatccattttgacccattaatttctttttcaagcttgtttgaakatttagaacaggaggcatttatattttataatttttgataaagtcataatgtcttttgggatacttgactcttaaatgttctataatgattctctttgcaagctgctttctgaatgaaggtagaataaatagaagtgagacaccataaggaaaccattgtttgttttgtttttgtttttgagatggagtctcgctctgttgcccaggctggagtgcagtggcgcaatctcagctcactgcaacctccacctcccgggttcaagtgattctcctgcctcagcctcccgagtagctgggactacaggtgtgtgccaacatgcctggctaattttttgtatttttagtagagacggggtttcactgtgttagccaggctggtctcaaactcctgacctcaagcaatctgcctgcccgcttctgcctcccaaagtactgggattacaggtgtgagccaccatgcccggctagaaaccattgttaaaaaaacctgtgattgatacgtttggctattaacatgtcacttaaagtttctgaatgaatgtggatgaatgagacatagtgctaaaacagattagagaaccattctctagagtaattagacattcagttrtacttttacataagataaattgaagtaaaatctattttaaatgcagaggtgatttcatagggttgtttgctgtatccagtggttctcagactgtgatcccccagccagcactatcagcattgcctggaaacttgtgcaaattatctcgacttttcagacctttaggtgattctgatagagctaaagtttgagaagcactgccatataggtctatcttcatttttattatctagcttgggtaggcatgttagtttggaataatgttgtatgggtctgaacttcctattgtaagtgacagaaatccaacttgaattagcttaagcaaaaaggaatttaaaggctttcttaggtgggctgggagattaytgtagtagcttacagattcaaagcaatagttgcaaagaatcagggccctgggggttgaaactgtttgtctctgtatgactttgtcctgtttatagatcctagacaagtgagaaagatggtcacaggagagccccaagttcacatcctctgagcttagcaactccagaaagagctgctttctaccattcacaaggccatccctcaaccgttatgttaatgagaatgaaagtcaatgattgacctagtctgggtcttatatctaagtgtaggaggaaatagaatgggaaagtgtgctactttggcagcctagttcactgctagataatagggttgctttcaaagtatcgttatttttatttttattgttatttatttatttatttattttgagacaaagtctcactcttgtctcccaggctggagtgcaatggcgagatctcagcccacaggaacctccgcctcctgggttcaagcgattctcctgccccagcctcctgagtagctgggattataggcgcctgccaccacgcccggctaatttttgtatttttggtagagacggggtttcaccatgttggccaggctggtttcgaactcctcacctcaggtgatccatccaccttggcctcccaaagtgctgggattacaggcgtgagccaccgctcctggccttactgttgtttttacgggtatagagtctctgtcacccaggctagagtgcggtagcacattcatggcccgctgcagcctctacctcccaggctcaagtgatcttccagcctcaacctactgagtagctgggactactaccacacctggctatttttaaaaattttttatagagttggggtctccttgtgttgcctgggctggtttcgaactcctggcctacagtgatcctcccaccttagcctcccaaagtgttgggattataggcatgagccactgcacccagtttaggcttaagtatctttgaaaaagagaaagtgaaatgtagaggcttatagaactacaagatggaacatgctcaaaaccttatattatttgttagctactcttttgttagagagtaattaactacttctttaaaagtttagggtatcttaatatgagagttaatgctttaggtttattattttgtacgaagttaatttttttgtcactataaaaatatattataggaggtctggaaaatacagagatataaaagaaaattaccagccgggcgcggtggctcacgcctgtaatcccagcactttaggaggccgaggcaggcagatcacctgaggtcaggagtttgagaccagcctggccaatgtggcaaaaccccgtctytactaaaaatacaaaaattagctgggcgtgttggcaggtgcctataatcccagctacttgggaggctgaagcaggagaatcgcttgaacccgggaggcggaggttgcagtgagctgagattgcgctactacactccagcctgggcaacagaatgagactctgtctccaaaaaaaaaaaaaaaaaaaaaaaaaaaattacctactgctttgctaaccagagacaattacactttggtgaatttcctctgcatatgttcttgcatagttatgactgtattatgatgttaatttttcttcgttttgaccagkgttaatttatttataactttgtgttggggtaatgaaaacataatcttagtcaatatagattccaccaaggttgtatgataatttttaaatcttgttttttcatttaactctacaagttaaaggatgtgttcattttaagtttcttggcatataacaacattaaataattttgcttgttaattgttcacttgatgggcaaaaatggtttcttattttgtgtcattaattactaataagtttgagcattttttgttgagctaactacttttcctttttgtgagttccaagttctatatctacttgtctattaacatcttagtggttttcttattgatttgtatgaactccttaaaagtgctctattttctttaaatggttttctagtttgagttttaaaggtttttttttttttttttttgacacataagcttattttgtgtattcagattccatctggcttttgataggttgttttctttctctcttttttttttttttgagatggggtctcactttattgcccagactggagagcagtgacaagatcatggctcactgtagcctcaacttcctggtctcaagtgatcctcctacgttagcctcccaagtagctgggaccacaggtgtatgccaccgtacccagctaattttttgattttttttttttttgtagagatgaagtcttgctatgttgcccggcctggtctcaaactcctgagctcaagtgatcctctttccttggcctcccaaagtactgggattacaggtgtgaaccactgtgcccaggcattttcttatttttaagtttagaaattctctgcttttagagatctgataactattctgttgttgctatttgttttactttgttttgttgattataactatttaatccatcctagaattcattttgaaacattatgtaaggtaaagatatttattctttttacgattgttttgaatttttatgtaggctctgtcattcttaaaatattttcaagctattcgaagaaaaataccatcttaagctgctttttagttatttctgtaggctaatggtttttaattccttgtgagatttaaggacaatgaaagatgacaaaaaaactttagtgacaatatattttagcaatggcaaaataacctcttttctgacaaatctaaactctcttatcagagttaaaagtttagacaacatttgtgattagccttctgttaacagtgaaaacatttgtattttctgcaaatagcatttatccatgaagaaaattagaatagaagtatgtttaaacagaaaattctagactcttcttcagacagctcaggcttttcaaaaagccttgtgctttggcaggagcccaggagaggaagtgtctacatctgctacattctagaagccttccccaaatcactgtaaggtagccaaaagagcagtgtatttccttactgtgtggttctggaagtaactggaagtttgcagcaaactcgagggaggagactarggagtacttccagtttttgtggtgatctgtttttattgagattcaagttagggggcagtggggttattttttagctcttgtagaacggggagctttcaatttgaacctgagccttttggtttagctcacgtcacataggaagacgagtcagaggggcctgcacaaagagaaacaggttgacaagtcagggtaactaatgggagcctgttactggggcaaactatactgtaatgtaacttattctcctgtaaggtaataagaaagacaaagttcatgtttgtaggggagaaggagcaagagaagagtgctagcagggcatctgggaaagtgaggtaaagcctttctgttggttagtttatatcctcatctgccatgaagaatcctcactagaaaagacggtgctatcatggatatagaggaaaaacactaatgggctttgctgccaggtttaaaaaaagaaaagaggccatagacatgtcttaggctaagtttttttttacatagaacacagttgataagagaaacaaaactgaagtctgggtcctttgagagaaaatactagtttaaatggacatggctgtttattcgttttggattctctacaacttaaaaaaaaaaaaaaaacaggcacagtggtacagacctgtatttccagctactcaggaggctgaggtgggaggatgatttgagcccaggagtttgagttcaacttggacaacataacaagacccctgtctcttaaaaaaacaaactaagtcaaaccaagagaacagtgtcattgcaatataattcatataccttataattcacccatttagtattcatgattcaatggtttttagtactttcacagagtcattccaccatcagtcaccacagtcaattttattttatttattcatgttttttagagatggggtcttgctgtattgcccaagctggctttgaactcctgggttcaagtgatcctcctgcctcagcctcccaagtagctgggactccaggcacctgccactgtgcctggccagtcaattttagaacattttattgaccccaaatctacaacttttgattgaatttattttaaaaagttaagctatataggaaaaagatgggccgggtgccgtggctcacgcctgtaaccctagaactttgggaggatgaggtgggcggatcacctgaggtcaggagttttgagactgtcacacacacacatacacacatacacacacacacacacactatatatatatataaaatatatatgaaaaagatggaacaaattaggaattttaaggattaacagaaagctctgaaatatttttcctttaaaatgtattctaacattttgaaaatgtattggtaatatttaatatttaaattgataagttggtacatttttatgagaaagtcataggataggtctaaatcacagagaaaacttatttttcaggctatatgaaaaagccacctactattcaattactctaattgtaatagtgactaaggagaacaaactcagcttgaatttttaagcataaattatcaggtgataacaaacatacatttttatctaatatgggtgcgttggctcacacttataatcccagcactttgggaggctgaggcgggtggataacttgaggccaggagttcgagaccagcctggccaacatagcaaaaccttgtctctgctaaaaagacaaaaagttagctgggtgtggtggcacacacctttggtcccaactacttaggaggctgaggcatgagaatcgcttgaacccgggaggtggaggttgccgtgagccaagatcacaccatggcactccagcctgggcgacagagactctgtttcaaaagagaaaaacacaaaaaagaaatgtcatggtagtactctcattatatgaaaaacaagatagtagctattattaaacaattgataataactaacatcaattttatgggcaaccttggaatcttttactttttcatagaaataatagataaggaacttttccttctctttgtattttttaagtaatggctgcatttctctctttcttttgtaggtgtgtgatcctgtaaaattaaatcttccaagatgatctggtatatattaattataggaattctgcttccccagtctttggctcatccaggcttttttacttcaattggtaagtcttactacttgttgttttttgttggttttgcattttttaatttccattttttagtgttttaaaatcagcaaaaacaaatacagtgtattcctagagtataggtttattccctgccccctaaaaggtccttttttaataatttgacattttctttattttttattacaaaaatgatacatattgaagttaaaataatttaatgcatatacttagtctttttcagtgcacagatatacaagtaatatactgcatatatatctaatctgctttttccacttaatctactgtgaacacaagtttttttttgtatttataacttaaaaaatattttatcattattattttgaatagagacagggtctcaccatgttgaccaggctggtcttcaactcctggcctcaagggattctcctggctgggcctccaaagtgctgggattacgacaggcatgagctgccacgcctggcccataagtattatatacttatgactcttgattccagtatataaaatgatgggttctcgcatcctgttataaataacagattatttgaaacttttttagtgtggcttttattaattaaataaaaatttaattctaattagtctcaaaaacaaaggtaaggtaaaggggaactaaagaagtaaaggtaaaggtgaagaaacattaatctttggaaagtagtgttgatttgcaatttaaaaatacatttgtagatataaagacaatttgctagcacagtctaaagcttgcaaaatcaagtggcttaaaaattagaactggaacagttgattagaaaagtttttggctttattttggtttatctggtaaaaaggaagaaaagatagtctccagcatatctgattcatgccagttaaattgtctcatagaatgaaacagtctcaatcattcttattcttaacatacttgtgttgaaggatatgagtatttgataaccttcttccccttctaggtcagatgactgatttgatccatactgagaaagatctggtgacttctctgaaagattatattaaggcagaagaggacaagttagaacaaataaaaaagtaagcaaaatgtttgcttattatgactctgactcaacctggatgttttctttctcaagctaaaatattctttaagtagaaatgaaacccatttttgagtcttacaaagccagttgcaatggctaaaataggagtatagagaacaagttaggcttgggccaactttcacatggaagaatatgggttgggataagaatatggatagataccagccggatgcggtggctcatgcctgtaatcccagcactttgggaggccgaggagggtggatcacttgaggccaggagttcaagaccagcctggccaatgtggtgaaaccctgtctctactaaaaacacaaaactagtcgggtgtggtagcatgtgcctgtaatcccagctgcttgggaggctaaggtgggagaatcacttgaacccgggaggtggaggctgcagtgagccaagattgtgccactgcactccagcctaggctacagagccagactctatctcaaaaaaaaaaaaaaaaaaagaatatggatggatacaggaagctgactgatacatttttttttttttttttgtgacagagtcttgctctgttgcccaggctggagtgcagtggcatgatcgtggctcactgcaacctccaccttccaggttcaagtgattctcttgcctcagcctcccaagtagctgggattacaggtgtgcgccaccatgcccgggtaatttttgtatttttagtagagacggggttttgccatgttggccaggctggtctcgaactcctgacctcaggtgatctgccctcctcagcctcccagagatgctgggattacaggcgtgagccaccgcacccagcctgactgataaattttaaaagtattgctaatatcttctatcctcttctaacctcttagtcaagccacctgctgcagcaattttccaattctacttatcctttactcccatggttccattgtagagattatagtgatggtagcgttagtgttatttaattgatacagtttttctcaaatatgaatttatttttaattgactcatgttcatagttaatcctgacctgagaattcctgtcttttatttaatgagtagctaagtgttcagtttttcattttaagatacagtttctagaaactggatgtaaaaatttagtataagttgrtttaaatgaacatgtaattgaatttgggttgggctaatttgtagtttgtaataatcagttatttggccctgggacctaagtctaaaatttttagacttttactggagggattcattcacaacttttactaagacagggaggttccatttactgtaaccatttgggagaaacaaaattaaaacaaaaagtcctatagttgtattgattctgccaagaggatgtcgctttttaaagagaccgagaccgtatacttttactttaaaaagaaactacagatatagttgaactcaaaaacttctagtcattttttttctgagcgtttcattaaattgtgtttttccctatgaaatataaatattcagtttttatgttttacatctgtagatgggcagagaagttagatcggctaactagtacagcgacaaaagatccagaaggatttgttgggcatccagtaaatgcattcaaattaatgaaacgtctgaatactgagtggagtgagttggagaatctggtccttaaggatatgtcagatggtaagtctgaagagattcctgagtaaggtaatattgccaccatatgtagaaataataaaattaatgataaattcagttcccaggaaaccagttcagttcagtgttgtaactggattatgcctgggtgcatttggtttgaatagagttaatttagtcaaaatcctgaattctttgattaaaaaagaagtaatttctttttttgttgacttgttttgaaatctgcaaaagtgaatagattatttggcatatagcttcatttctgagggtaatcatttttattttaggattaccttcaaactttaaaaatttatgtctttatctgcaatcaatttaaaaaaatgttgggagtgttactataaagagaagtattagctgtgttctatctagtattttgaagtttagaattagtttgctcaatgtggacaatcaaactgaggctgcaaacagtaaaaatgagtaagtgatacaatacaatttgtagttggagcrttgaaatgttttagatactttaataacagatgtagaagactaaatctggactttattaaggaggtaaagggattatgcctcgccccccgccgccmctgccctgccccgccaagaaaagaagaagagagagacggaaaagagctgagctagttgtgtagataaaatactccaagggtacttaccagtgtttgtaagcagtgaagtaaacttattatgcacagggatcaggaagccttgaaaagaaaaatatggcaagtacttgtgmatacttctttactgtgagagggaaatgcctgtgattattttctgtactgtataacaccttgggaacttttttttttttttttggagacagggtctcactgtctaactgttgcccaggctggagtacagtggcacaatggtggctcactgcagctttgaactcctgggctcaagcaatcctcccacctcagcctcctcagtagctagcactacaagcatagaccaccacgccaggccaatttaaaaatttttctttcttagaaacaaggtcttgctatgttgcccaggctgatctcaaattcttggcctcatgtgatccttccacctcagcctcccacagcgctagggattacacgcgtgagccatggttcctggcccctgaaccattttttaaaggaaatcgatatatttattctcaagtaatgaactaagttgttttataatgtgaaccttggcactttgttgttttaatctgtagtagtcattctataatgctatgagagagtatatatattttaatttttcttagaattttgtttgtagcataagagatattatagccttctataaaacttataaaacttgcttgtaaaattccayatagagattgcaactgagagttggtcgtaaaactaaaaatattgttgggaacagagcaggtcaaaactcccatgattgatctaataatggaattatactggtaaaaagccactgcacttcagcctgggcaacatggcaagactctgtctctaaaaagagacaaaacagcataaaaatatgcttgatataaactctagccctcttctagttatttgttcatttgtacattttcatttcacgcctgtaatcctagtagtttgggaggctgaggctggcagatcacttgaggtcaggagttcgagaggagcttagtcaacatggtgaaaacccgtctctactaaaaatataaaagttagccgggcctggtggtgggcacctttaatcccagctagtcgggaggctgaggcaggagaattgcttgaaccgggagttggaggttgccatgagccaagattgcactgctgcattccagcctgggtgacagagcgagactccatctcaaaaaaaaaaaaaaaaaaaaaaaaaaaaaaaaaaggcctggtctcttgctgttcaaaatacgtagctggctggacacagttgctcatgcctgtaatcccagcactttgggagaccaaggcaggtggatcgtttgagaccaggagttggagaccagcctgggcaacacggtgaaaccccgtctctactagaaatacaaaaattagccaggtgtggtggcacatgcctgtaatcccagctactgggaggctgaggcaagataattgcttgaacctgggaggtggaggttgcagtaagctgagatcatgccactgccactgctctccagcctggatgacagagtgagactgtctcaaaaaaaaaaaaacaaaacagttgattataagttaatgagaagagagggaagtctcatacctaacttttattcacaagtaatgatactgatattaaaattttaaaccaattttttatttcttaaggagtgtttagcattcattcttcttggggttatatagttatcagtaattggtttgtttgatttttgcatactttatataaatcctctaagattaggtttatatattgtaaattttggttgatcaacgtcatgtttgataattaaactgatttaaatatattttagtaaactagctttgctgttgatcttaaatatatagttaatatctcttccttctccttgaagaattccaccaaactttatatatttacatatttatataatgtgtaatacatggaagaaaaaaacaactttaagagcacatattttacttaccatctgttatctggaagtataattgattgtcaatgaatgtcatttcagacccataaatgtgttcatttctcaaacttagtggatgcactttgttttcttgctgtgttatataactaaaaactcataactattatgttaggtgatctttacctgctaatacagatacaatttatataacagcgtcacagtccttaagcaacactaggcttttggaagattgaacaagttagaagtatgccaagtcttattcagtgtatttaattttttcttgttgagtatgtagaacttttcatggtgtggtagaaaataataaaatagattttgaacaatccttattaagtctctttatgggaagtttatgaggttctacagtttttttttctttgatttatctatttcaaggctttatctctaacctaaccattcagagacagtactttcctaatgatgaagatcaggttggggcagccaaagctctgttacgtctccaggatwcctacaatttggatacagataccatctcaaagggtaatcttccaggtaagatcattcttccattctataaaatacctatcacctagcttctctgttgagtccattaacacaatgttagtataaaaaagacttgcattttaagattttaaattgtagtttgtttcatagccttcgaagactaaagaatcaccttccctttctcttagggcttaatagttacgggtatgcttctagcttctagcttgttactctgaaagcttgtattgatagagactaacttaagtagggaattttagtgtgtaaggaaaagaaactatcatttcaccaaatgtttttattcagaacacctaatactatttgaaagctttgtatgtaaagctataagggattgatagtcaaagtttatatgttaaataattaaaagccaagatgttttgggtatccacatatgtttaaagtgttccatagtatggaacatcctactttctgacctatttttggcaaagtcctctttttaagttacagttgctttcatgataatttacttttgccgtccctcactttttcaaagtttgtgactcattaccactactatctcctgttattgtcagctgcagaaataaaatatgttgtctgtgtcttcacattgaaattgattttctccgtaagaaaaaatcactgggatgagttgttaatcaaaatgttttcttgctcatctccctttatttgaggtgaaggtatccgttggtaaaaactaaacatggtataatagtaaataaaatttctgttaagctggaatataattccattaatttgaacttccaaaaatgtacaaatttgcaaattttcagtttctactaatattatacattataacgcttttgataagattataaccttatttttaaaattggtttcaggttttcatagatattaaatacttaatatgtgccagctattatgttaggtactggggacacataatgaacaagacatacactaccctcgccattagggtatttaacattcttacagtatagtaagatgagtgcttggatgggagaaattcaggataccatatgagcacatcaaaagaaacctattgctggacctcataagggatgtaaaggaagaattcctggaagatacacattaaaaaaattgagatctaatggaccaggaattagccagaaaaatgggggagagggagacaggagtgggtgtgggaaaagtgtttcagacagagggaacatgtagaaaggtcaaaaggagagagcatatcatattcagataactaacatgtagtttgtatggcttaatgtagagttcaagaggtgaacgcaccaggtggatatgggggtttggctttgtgagagtagtgagagctgagactagagaggtaagcagaagccatctcttggagagctttgtaagccatgtggaagagattgaactgtcctgagtgcagtgcggagctattaaaaagtttgtaagggaaatttatgatttttccttttagaaaaccattctggctgccgaatggagattgggttggggccaagggacgaagaaccagggaggaggctgttgcaaatatttaagtaagaggtggtagtggatagattatcaagctacttattagagtagaatagtagaatttgatgatgtacttgataggaatttctggcttcatcaactggatagattccatttaacaaaatagggctggcatggtggctcatgcctgtaatcccagcactttgggaggctaaggtggaaaggatcccttgagggtaggagttcaagaccagcctgggcagcatagcaattccctgactctacaaaaaaatgaaaacttagctgggtgttgtggtgcttgcttgtagtcctagctatttgggaggctgaggtgggatgtattcacactgctatgaagaaatacccaagactgggtaagttattttaaaaaagaggtttaattgactcacagttccgcatggctacggatgtcttaggaaactcacaatcatggcagaaggcacttcttcacagggtggcaggaaagagaatgagggccagcaggggaaatgccaggtgcttataaaaccatcctatctcatgagaactcactgtcacaagaacagcatgggggaactgcccccatgatgcagttatctccaccttgtcccgcccttgataggtggggattattaaaattcaaggtgatatttgggtgtgaacacagagccaaaccatatcacgggaggatcacttgagcccaggagttcaaggctgcagtgagctgtgatcacgccactacactccaacctgggcaacagagtgagacccctatctcaaaaaacaaaaagcaaaaaagaaaacatcccacctcagcctcccaaatgtgtggtggtgggtaataaatgttatttagattactatatgtgttttgtttaaaaaatgattatattcccatcaaaatggtcctgaatattatttaaccctgatttcactgtgtttagtcttaggggcaatattcattctttctcaggtgctttttatctccttgttgacttttttcctcttttatcacagttttgggctagttcttattgacttttctttcaggcaaattccttataagtagaataactgaaatttcctaatcacattataccctataagtggtaaaaataatagcatgaatactagcataagagtttttaggctcccccaacccagattattttctgttgttaatagtcaaatatcacaaatgtgttcgaaggcttcttgtgcaccttcccttgtttagaggtaatgactattctgaacttggtgcgtatcctgtcatctttttatactttatcatatatattttccattgtattgtgtttttaaattttatgtcaatagtacatcatactctatgtatctttctacaacctttttttaacctaatattttcagtaaatttatctgtgttgatcagattcatctaactgctaatgtggtattgtataacattatttattcattcttctgtggatggatgtacatttagattttgtccaattttttgctttatcaaatgaagtttgatacatctttgttgatttctttttgtggccatgtactcacgtgcaaggctttctcttagggtataagaaatcatagggtatttggtttttcatcatacttaccagatgtggccagattgctttccagagcatgtatttatactgtcaccagcattgtatgagagttcccatttcttcatatccttgccagctcttggttttgtcagactttaaaaattttagcaatctgggtgtgaaatggtgggggtgagggaggaaggatgcatgtattttaaattttcttcaaacaaaaaagtcagagaaatgcttagtgaatttatattgatgccacatcactccttgattagtttcatctgtttcttttgcctctttgggcctatcttttgaaatgctttgttggtattttaatgaaaaatctgataggttacatgcattttgacatcagtgttgtccttatagttcttaaggacttccttcagttttcagattgtttgttcccaaccctgatttgttgaatagatccatatctgccaaagatatcatgcttttttttaagctgtgattttttttagggggtgggggtcagtaatagaaaatgtcatatgtacaaaattcaatttgcttcatgtggaagttgaatgttcacccttctggtcacttgcatcactgtcttggtaagttaataaggtaactatagcaaacagtagattctccagacatctctggagctcactcagctatcagtgtaccacactgcctcagaggtgggacattaacttctaagtgtgtgcattttaaacataattatcccttacaaattaagttttgatccattaagtgttcttgtgaagtgcaagaatttttggattacgtgtctctctcagtttaacggatgatgtctctctcagtttaacggatgaaccataaaaatcgatttctttttcttttttgacatggagtctcactctgttacccaggctggagtgcagtggcgcagctcggctcactgcaacctctgcctcctgggttcaagcgattctcttgcctcagcctcccaagtagctgggattacaggtgcccaccaccatgtccagctaattttgttatttttagtagagatgaggtttcaccgtgtcagccaggctggttttcagctcttgacctcaagtgttccgtccacctcagcctcccgaactgctggaattaaaggcatgagccactatgtctagctaaaaatgtatttctaaataatgtttttcctatagtgcctatgatattatagtttattttctttattttctttatttttttgagacaggatctcactctgctatcaacccaggctggagtgcagtggcacaatcacagctcactacagcctcaacctcccaagctaaggtgatcctcctacctcagtctcccaagtagccaggactacaggcatgtgccaccacaagcagctaatttttgtattttttgtagagacagggttttgccatgttatccaggctggtttcgaactcctgagctcaagcaatccacccccccgcaccccgcagcctcccaaagtggtggggttacaggcaagagccactgtacctggcctgatattatagtttctattgtgacaataaattaaaagactctttagtgttagtttactttcaatttggtttattatattcaatttggtatgttcatgtcagtcatccatgcctcttcctttgaaccaaaggaatttacaacttattcttgtttctcatcaaactcggtttgctttttatatgaagctttttacagtctttttctgcccataccactttccttatttcattttcttctttgttttcttgcctactttttcttctcatgttctctactttggaaacagccttccttttcaaatgctgcattacttttgatttattttaaaatcagattcccaggcagtctgcctttaatattgttaatagatcagtaagtaagacaagcagaaatactttaccaaagcagaatagctaaaaatcttctactatctctgccatgcatgttcaaataatgttgccagaatatcaagtcatgtaaaaaaaattattggtgctatctgcgtggattaatggcatactgtcatcttatgtgttttgcatgtccctaagagaaacatttataattgctgcattatgagctcatcttctcagtttactagttctcgtaaccgaaaaaataatagcattgtcaaaatttaatatgcatctttagtttctggaactaactcatgttaaactattaagaagttagtttcttagcatctgctgttgttggactatgtccatccaaaatttaggtggtgaaacttcatggccagtgtgatggtattaagaggtggggcctacaggaatgggatttaaggcccttatgaaagaggctttatgcagccactagctctcttgcccttcagccttcaccatgtgaggacatagcattcttcccctctggaggatgcagcaacaaggtgccatcttggaagtggagagcagccctcactagacaattgaacccgctggtgctttgaatcttggactacccagcctctagaactgtgagaaaataaatttgtttttttataaattatccagtccttggtattttgttatgggagcataaatgcactaagatagtatcctttcctagagtggaaggcgggatagagaattatttaagggaaaaacatcaaaacgtgggtcttcatcttcattttaggagtatactgataatcagttactgcctgtaagtgactaatggggccagaaaaaaaaagtgaatggagatgattgtatgatttgaatatttgattatattgggtcatgtgatcctccagtgcatacacctccaagcttggactctgtttgatactggaattcaacagctcattgtcagaccagggcatgcttttctgtagtctgcaaatgtctgatcactagcaaaacgtgcccataactttacttccttttgatttatttctcataaatgccttttctgttagcatctttttaaaaacatatgtgaccaccattggataggttatagctaagtccggttctgggcattttagtgactctttgaagtgtattcaatcaaaatttattaaagaaaccactgttgtgtttgtttctctaccagttttctttgtgatgttatcggacacttaataaatatatacagttttatgtgttttatcagagaaaatgtaggctagtctgtctttgaccagtagtttctggtcaaatacaatattatactagtataatattgacttagtctcagaactgtatattctgagagaaatgttgttggagaagtcatattttcttgtgtaggcttgttgttgttttttcacatacctgtcattttttttttatagtgtcagaaagggaactatgtgattttctgtgtaacagcataaaaagagccctgtaggacatgactttctcctttttccattatttataaaatttcttttattatggaaaatatcaaatgtcacacatacacaaaaataaaggtaataacataatgaacctatgccatcaccaagctccagacgttttaaacattttgtcattcttggtttatctactccttccaccctttctttctgtcatttttgttggagtattttaagagcaaatcctagacatcatgtcattttatccataaataattcaacatgcatatctaactgatcaggtctttattaaaatttatttttttgaggcaagatttcactctatcagccaggctggagtgcattggcatgatcatagctcactgcagccttgaacttttggactcaagccatcctgctgccttagcctcctgaacagctgggactataggtgcgtgccaccacacctggctgatttttaaattttttgcagagatgtgctattgctgtgttgcccagtctggtcttgaattcctggcctcaagtaggtctttgtaatttatttttaatttttttttagagacagggtctcactttattgctcaggctagagtgcagtggtaccattatagctcactgcagccttgaactcttgggctcaagtgttcctcctgccttagcctcccaagtagctgggactataggtataagtcacctgcgcccagctggtctttttaaaaaagtaacataaccacttactatctccctgcttaacaaatcgacagtatttccttaatataatttaatacccagtcaatattatttctctggtgatctcaaagttgttgttttacagttgtatttttttaaattatgtctgttaagtcccttttattcccttttccttttttttctttctctttatgacattggttagctggggaaacctagtcatatgttatgtggaatgttccacattctggagttgactactttggtggttaacatgttcctttaatgcctatgtttcctacacactggttagagcttgtggcttgattagattcgagttaaattttaaaattaactccataggtggcgctatgaactttcttttgaactgcgtgaaccaacacctaatgtcctgtcccactttttatgatgctgattgatgagtgaggttcaggtgatgagagcctgatccctccatataaagttctccttaagttttatctactggttttggcagcctttgatgatcattgcctagaaccactatttcattaggggttacaaaatgatgatttttttcattccattattccttttacttttattaactggaattctataaacaggaacatccttcatgaaccatttggttaccctgaactatatataggaaaggcagggtaagtctataattagtcttctttatcagttttcagagtaatgagttggtgtcctaaccatttttagtagtgatctgtaattttcatgacatatcatgaatatggatattattattttttttttgtatttcagcctattcagtattactttgatctcagattatcccattttaggccagtggggagcatctttagataggcttgtttttttgaattgactgtgttattattctttgatagagaggaaacttccttgctttctggcacagttttttttccaggtttctattccagagtaggaactaggcatttcttcaatgagccttggcccttctttttccccccttaagagataggttcttgccatgttgctcaggctggagtgcagtggctattcacagatgcgatcatggtgcactacagcctggaactcctgggctcaagtgatcttcctgcttcagccttctgagtagctgggactacaggttttccactccttgcctggcaaggcttgattgctttgaacagggatgacatttaagcagcagagtctagctaggttctaggggtgattattgctatatagtttgtcataaacagagacaggaaatatgtaagttcatattgttcaaattgaaaaccacagggtttatatttatatctcttttcttctgaaaatttggttcctaaggatattaacatgattattcttttattcatactattaactcatactattttattcatactattaataacattaagactactgaatacaggtttttttgtactttatatccttaaaatatatcactctagatatgatcagtcaaaatcttgttttaaagacatctgaggtaattcatttctctttgtggctatgcccttaacatgttatacagttgagttcatttatttcatttcctcagatttttagggattgtcctcgttttttcttttgattcattgttttcatttgtttgttttagaaacaatatcttgttctgttgcccggcctggagtgcagtggcatgatcatagctcagtgcagccttgaactcctgggctcaagggatcctcctgtcacagcctcccaaatagttaggcctacaggcatgcaagtaccaccatacctggctatttttttttattttttattttatttatttttattttattattatttttttcagatggagtcttgctctgtcgcccaggctggagtgcagtggcgtgatctcagctcactgcaagctctgcctcccgggttcacgccattctcctgtctcagcctcctgagtagctggcactataggcgcccgccaccatgcccggctaattttttgtatttttagtagagatggggtttcaccatgttagccaggttggtctcgatctcctgacctcatgatccacctgccttggcctcccaaagtgctgggattacaggcgtgagccactgcgcccagcctttttttttttttttttttttttttttttttttttttaaatatattgtctcattattttgcccggggttgtcttgaactccctggctcaggagatcttcctgccttggcctcccgaagtgtcaggattacaggctctagccgccatgcccagccaatttattgtttttaattatgtaaaacttttaaattctttgacagtccaaactagactaataaggtacattaatagaagtctcactttcattcttatacttttcaacctattcccttcctttttctatgtgaccattttgttagttttactatttccagttttttaaaatacaagcaaatatatatctactcctatattctctcaacataaacacaaaagatagcgtactggctgggcgtggtggctcacacctgtaatcccagcactctgagaggccaaggtgggtggatcacctgaggtcaggagtttgagaccagcctggccaatatggtgaaacaccatccctactaaaaatacaaaaattagctgagcgtggtggtgggcacctgtaatcccagctactcaggagggtgaggcacgagaatttcttgaacccggcggggcacggaggttgcagtgagccatcgcaccactgcatttttagcctgggcaacagagtgagacttcgtctcaaaaaaaaaaaaaaaaaaaagcatactataaatactgttatgtactttggtgctttaatttattgatataccccagtcattacttcatgtatagaaatcctcatttctttttatagctacgtgttattactctattttgtggaggttctacagttttttttacttattgtcagtagaggatgatttattgggaaacttagagatggaagcatggtcttgggcagtagcaagacaggtagatctctgcaccgttagtccccagacccatgacttaagtgtcatagggaaaggatgtacatgctctgtagggacaaaggcaagctccagaacaggcaagaatgctatgcgtgtcatagcctgtaatttttgtgataacatcaaggttgctttgctctaaaggcaggatttatagtgggtacatgttcctacactaaggacagcaagtaaagtagaaatcagcaggcattcgtgggactgaggttaatcaaaagtgaacatggtagattagcatgcaagatggagtcactgttgtcttcacacccatcagtttctacttttttcatcccatttcttaataaccatctaaagattgccaccctgctagagcgcgtcccatgaccatcccctttcttttttcccttagtttcacccctatcaatgttgtctttattcacctttttttttttttttttttttttttttttctggacggagtcttgctctgtcacccagactggagtgcagtggtgcaatcttggcccactgcaacctcgcttcccgggttcaagcgattctcgtgcctcagcctccccagtagttggaattacaggcgtgtgctaccatgcccggctaattttttgtatttttagtaaagacggcctttcgccatgttgcccaggctggtctcgatctcctgagctcaagtagtccgtctgcctcccaaagtgctcaaattaccggtgtgagccactgtgcccagcccttttctttaatttagactggcatttatgtataccattttcatttttcatcattctttattgtacctcagactttccttttggaattttcctccttgaaacacattgttaagaagccctcaaatgtgctttgtttggcttggaattctttgtttcctgaatctgaacttccatgcattttaattttggaaatttttctaccattatctctttaaatactatcttatctatattctttctgttctcttcttctagaattccaagtagacagactttagtttttttgtctttgtgtgtgttttgtttttgtttttgttttttttaagagatggagtctcgctccgtcgcccaggctggagtgcagtagcgccatcttggcttactgtaagctctacctcccaggttcatgccattctcctgcctcagcttcccaagtagctgggactacaagcacccaccaccacgcccggctaattttttgtatttttagtagagacggggtttcaccatgttagccaggatgatcgcgatctcctgacctcatgatctgcctgcttcggcctcccaaagtgctgggattacaggcgtgagccaccgcgcccggccttgtctttgtgttttaactagcatttcatgtttttatctctctctactgcattctgggtagtttatgccatgataatttattcagctctctctgctggatttattattttctttttagttgtgtttaatctattttttttttttttttcgagacagcgtcttgctctgtcactcaggctggagtgcagtggcgtgatcttggctcactgcaagctctgtctcctgggttcacaccattctcctgccacagcctcctgagtagctgggactacaggcatccgccaccacgcccggcgaagtttttgtatttttagtagagacaggctttcaccgtgttagccaggatggtctcaatctcctgacctcatgatccgcctgcctcagcctcccaaactgctgggattacaggcgtgagccacgcactcggccttaatctacattttaaccagcctaatgagttttgaactgtcgttggttatctttatgatttttggaaggtcttttgtttttcccattccaatatgcctgctctttgttggggtattttttatttttatttattaatttatttattttttgatggagtttcattgttgttgcccaggctggaccgcaatggcgtgatcttggctcactgctacctctgcctctcaggttcaagtgattctcctgcctcagcctcctgagtagctgggattacaggcacccgccaccatgcctggctgatttttatatttttagtagagacagggtttcaccatgttggccaggctggtctcgaatttccgacctcaggtgatccgcctgcctcggcctcccaaagtgctgggattgcaggcgtgagccaccacgcctggcctaggatatcttatttgttcatattttctatttttaaatttattataattttctctatagcattgaaattatctttcttaatgaaaaatgctattccattaaattgatatatctgcctatatattccttatttcctcgcttttagcttattacagtttttagctataatatgtttcagccacaaaaatcttttatacaggaaggtccccaacccctagtactaaatctcaatgaaataactgaaaaatagtagtattaagtcatagagtttaaattcttcttttctcttattgctgaatttcttaaaagcaaagttaccagtttacattgctgcttcctcccactattaggttttgccatttaatgttataacatcaggagcacaaacttctggaggtgtatggaacagattccatttcttacttttaaacatgtgaccttggacatattagttaacctctattttagttcctcatctgtaataagatggctttgaggattaaataagtgacaaatacttggcagatagtaagacctcaataaatctaggccattattttaaaatatttttatttgtggtggttttaatttcttcagtgatgaatgagactaagtattttctgaagtgttttctatttatattttatctcatgtgaactatcaaatacctccttttcttaaaatagaagtttcactgcagaagcgagttgacataataacaccaaaagcacaagtgctgaaagattaataagttggacttcatcacagtttcaaaagtgcaccatcaagagagtgaaaagacaacacacagaatgggaaaaatattttaaaatcatgtagccgagccaggcacctgcagtggctcacacctgtaatcccagcagtttgggaggctgaagtgggtggatcacgtgaggtcaggagttcaagaccagcctggccaacatggtgaaaccccgtcttgactaaaaatacaaaaattagccagcatggtagcacacrcctgtaatcccagctacgtgggaggctgaggcaggagaatcgcttgaacctgggagatggagattgcagtgagctgagatcgtgtcactgcactctagcctgggtgacagagtgagactctgtctcaataaagaactctaacagagtgcaagcagtggtgcagtcatagctcactgtaaccttgaactcttgggcttaagcattcttcttgccttagcctctcagctagccaggactacaggtatgcaccacaatgtctggctaatttctaaaaattttttttttgttagatatgagggtctcattacgttgtccaggttcgtctcaaactcctggccttaagcagttctccttccttggcctcccaaacactggattacaggtgtgaaaccaccgtgcctagccaccaaattttttaaatgggcaaaagctttgaaaaggtattttttccaaagaagatacacaaatggaaataagcacacgataataggcccaacataactagtcaccagggaaatgcaaatcaaaaccacaatgaaatgcctcttcatactcaccagaatgtctacaataaaaaaggacaataacaagcattagcaaggatgtggagaaattggaatttcataccttgttggtgggaatgtaaaatgatgtagccactttggaaaacagtttggcagttcctcaaaacgttaagcgtagagttgctataggaccagtcagttccattcatatgtatatactcaagaaatgaaaacatgttcacatagaaacttacacacaaatgttcacagtagcattatgtccagaataggcaaatttgtagagacagaaagtagattagtggttgtctagggctggggcaaggtggggaagttaatgggtagtgactgttaatggttacagggtttctttttggagtgatgaaaatgttctaaaattagattgtggtgatggttgctctactctgtaaatatactaagaactactgtaatctttcaatgagtgaatttatggtatttaaatgacatattaatgctgtttaaaagaaagaatccagttgacgtatttacctctcctcctgtacattcatctcttgcccagattgttggttagggatgagatagatatatctcatatggtggccgggcgcggtggcttatgcctgtaatcycagcaccttgggaggccaaggcgggtggatcacctgagatcaggagttcgagaccagcctgatcaactccatctctactaaaaatacaaaattagctgggcatggtggcacatgcctataatcccagctactcaggaggctgagacaggagaatcacttgaacctgggaggcggaggttgtggtgagctgagattgtgccattgcattccagcctgggcaacagagcaagactctgtctcaaaagaaaaaaaaaaaaagagatgtatctcatatggtaattcctactgttaggaaatagtatatttcaacttaatggatgtttcattttggtatgatggctgataatttcagtcttgggttctctaggttctgtgtcccctaataccagctgtgtgattcttgtttatctacattatattatagattgttccattgtttataaaattagggtaatttttgctcatccagaggattattgtgaacttcaaatagaagtgagacagcattttgaaagctgtgtagtcctaaataaatacacagtagtgttaagattcctaaagttctctgtattttcttttcataggagtgaaacacaaatcttttctaacggctgaggactgctttgagttgggcaaagtggcctatacagaagcagattattaccatacggaactgtggatggaacaagccctaaggcaactggatgaaggcgagatttctaccatagataaagtctctgttctrgattatttgagctatgcggtatatcagcagggagacctggataaggcacttttgctcacaaagaagcttcttgaactaggtatgttatctgggcctaatttaaggttatagttatattgagggatatatattctctatttttctgtctttccctcatttatatatggtattttcttactttttagaagtcaggagctttacttgttaaatatacattattctcttctttattctcaaagtaaatgatggctgatttttctcacctaatagtgctataacagtggttgtgtttctttgctctatattctccaggaatttcaaaattgaagctaacgtaactaagtcaaaaatgtttgtttaccatgttgccattttaatcagtttcctttgaagggtgttatgttttattgcatttcatattttaaaataaagtgatttaaaatagatgggctgaaaatatatttatcatattcaaatgttggaaaaatacaccttaggagaattttatcagtagtactttgaacagagatgtagtgtttcttcaagtatggcccaagcaccacgtgcatcagaattacttggatacttgttagaaatgaaaatttcttgatctctaccctagatctgctaaattgtaatctctggagatggagtccagaatttgtatgataataagtttaggtggcctttggtatataacgaagctttaaaactttaaaaattatttttacaaaataggaaaatatgtgcatgttagaatcaaacagctcaaaaggattgatctgctgaaaatgaactttggataattgggttatttcttagttgggtaataataaatcaagatattggttcaagtaatcttttttcctttcagtattttccagtggtatttcctcttgacttaaaatatactttgtactcattatagaaaatttattaaaacagagaaagatacagaagagtcatctataagccagtcactcaaagacacctacacatttgtttccttttagtgtatacgcctcttccctgcacacacttttcctttgcttttacaaaattaggttaatattggatatcgtaacatttattgtgagcagtttctgaaggacaagaaatattttacaatctaagcctaggtatcctaaacacttagttactgtcacaagtgaagtctctatatattcttctgcctttttatttttatgtgtgtgtggttctttagttttttttttttttcctctcagatgggtagcgtagtcatcttttcttctactaaaaggtagttcaaaattatgactagcaattctgaggcagttagtggattccagcttattcgaaaattatatctttagtttcccttttccttcttacttagaaatttgggactgaacttcactcagcccttagaagtaggctacatttataatgtatctgtggtaaaggttgcttttgaattgcttatcccctgtcttcctcatgtgattgtttttctgtcttggaaaaatctttttcatttcttaaaataagtaggatgagtaagattttaaacttcatttgacatcaaattgaacttagttcctttagctgattagtaaattctcaaagtaaaagcaccagttgccacctttaaataaatagctgtttctgtctccagaactgtcttttttgagacagggtttcactccttttgcccaggctggagtgcaatggcatgatctcggctcactgcaacccccgcctcccgggttcaagtgattctcctgcctcagcctcctgagtagctgggattgcaagcacccaccaccacgcccagctaattttgtatttttagtagagacgaggtttcactatgttggtcaggctggtctcgaactcctgacctgaggtgatccacccacctcagtctcccaaaatgctgggattacaggtgtgagccaccaggcctggcccagaactgtttttatataggtgactatatgtcctgatttacttgggggcagtagtaacttatacctattattttggtataataatttttattagtgcctcctttcactcacaacagcaacctggtttggaagataaattataatgtctcctattttyatattactatattctgatgcttgaacaagcatgaacttacccatggacatgctttgtttctcttctaatagatcctgaacatcagagagctaatggtaacttaaaatattttgagtatataatggctaaagaaaaagatgtcaataagtctgcttcagatgaccaatctgatcagaaaactacaccaaagaaaaaaggggttgctgtggattacctgccagagagacagaagtacgaaatgctgtgccgtggggagggtatcaaaatggtaaagtggaaaagccaattgtgtgtatgtgaatgtgtgtgtgtatgtgtttgtacacagttctggagagaatcagttattttatatttaagcctatgtgataaaaatcagaatgactgcataaaatattacagtatgtcagcttaggcaacatagaccccattacaaaaaaatttaaaaattagctgggcatgctggtgtacacttgtagtcttagctactcaggagtctgaggtgggaggatcacttgaaccaggagttcaggggcacagtgagttatgattacaccactgcactccagcctgggctacagaataagaccctgtctctaaaaaacttttttttttttttttgagatggagtctcaccctgccacccaggctagagtgcagtggcatgatctcggctcactgcaaattccgcctcttgggttcaagcgattcacctgcctcagcctcctgagtagctgggattacaggtgcccgccaccatacccggctaatttttgtatttttagtagagatggggtttcaccatgttggccaggctggtctcaaactcctgaccttgtgatccacctgccttggtctcccaaagtggtgggattacaggcgtgagctgctgtgcccagcctaaaaaactttaaaaaaaaaattacagtataccattctctctctgtgggtgccacatttaatatgttccaattattagtaaaatagctttaaaataaagcttgtgaatcatatactattacatatgtttggggcaatattacctttttcatttgatccttccagggtgaaggatcaaataagtttaaaggaagtgatagttttttttatatttaatgcaagagagatttcagcagtatttttttttttttttttgagacagaaacccaccctatcacccaggctggaatgcggtagcgcagtctcggctcactgcaacctccgcctcctgggttcaagcaattcttgtgcttcagcctcccaagtagctgggactacaggcattcgccaccatgcccggctaacttttttgtatttttagtaaagacggggtttccttatgttggccaggctggtctcaaactcctgacctcaggtgatcctcccgcctcggcctcctaaagtgctgggattacaggcgtcagccaccacactcatctgttcagcagccttaattagagacaataacactactctgtgcatcttatgagatacaacagattcatctatacaataatcccttgtagttttgctcctagttaatcttcacaagattgcttagtgaaatgctttagtctgtttaatactgaaaatgcagaaagttttcaacagattttgtctttaatatttctttaaaatatatctataaatattactttgtttattgtatatgtatttataactcagaattccagttctatagatgttaatagatactaggccaaaagcaaaaagaacaaagtctggggaacatttgttaaacaaagttgaacataggtttttgtttagcctcaaaacttctcagaacctttttatgataatgtgcattgtgatatgatatacattctttctcaatattaattgattatggaaccttttgaaaaggaatttcatgtggtattagttttcagttgaacacaggcttgcatagaaggagttagtgaatttttggagtaagtacttttaggtgtaaacatttgaaaagtgtttaacattttctttactactggtaaactcaagctgggctttgcatttcgatattgatgactgttgacagcttaaccactaacagcaaagtatacaatacgtatggtgacactttcaatagataggttcatggagtcctaggaggacatgcttgagctaatgagtaaatacaaagatggtgacactgttagactcattattttcttttttttttctctgagacggagtctcgctctgttgctcaggctagagtgcagtggcgccatttcggcccctgggttcacgccattctcctgcctcagcctcctgagtagctgggactacgggcgcctgccaccacgcccagctaattttttgtatttttagtagagatggggtttcaccttgttagccaggatggtcttgatctcctgacctcgtgatccgcctgcctcggcctcccaaagtgctgggattacaggcgtgagccactgcacctgttccctcattaaacattttcttttctgtttcattactaaatattttagtatgtatcttttaaagatacaaattcaaaataactacaataccattatcacctaaaaattcacaagttttgtaatatcaaatatctagtgttcaaatttccgcagtaagcagaaatttttattgctcttaataactcttaaggaacaaaataaaactgtagatataaaacaaagagtctgctaatttcccggtttgttaatgtaacacatactcaactttgcctaagatcaaaagaacattcttgccaggcacgatggctcatgcctgtaatctcagcactttgggaggccaaggtgggtggatcacctgaggtcaggagttcaagaccagcctggccaacatggtgaaaccccatctctactaaaaatacaaaaagttagccgagcatggtggcaggggcctgtaatctcagctacttgggaggctgaggcaggagaattgcttgaacccaggaggcagaggctgcagtgagccgagatcaaggcattgcagtgcagcctgggtaacagagcaagactttgtctaaacaaaaacaaaaacaaaaaattctttttctcagaatagctacattcatctcatcattatataaaagacttactaaaaattaaagccttggatttgactctaggtaaagtgcatggagaataaacatgaatcattatttgttttagtatactattastataataattgaaacagactactcatattcctgcttatgtgacatacttgtttttgttttgttttgtttttttgagacagcttcttgctctgtcacccaggctggagtgtagtggcatgatcatggctcactgcaacctctacctcctgggcttaagcagtcctcccatttcagcccctcaagtatgtgggactacaggcaagtgccctcatgtccggctaattttttaaattttttgtagagacgagatttcgctgtgtgacctaggctgatcttggtctccttgggctcaagtgatcctcctacctcagcatcccaaagtgctggggttataggcatgagccaccatgccaggcctgacatacttgtttaattaagagaagtaggcaacaaaataacttattaatataatacatagatgattgaagggaatttgttttgttgactgctctatttttatactgcctaataaaagcatctgggatctttgtttaataacttattttttctttttcagagctatccattttttattttgcccttaaaaaaattcctttttttttttttttttttttgccacaagcatttaactgtgaggtatttaggaaaacctagttttttttttcttctagaaactttttgtctctgggtgctttccagttactttgtgccatttagagcaatgccaggcattcatttaatattttcataaacatggcttttttttcatatttaaacatttgaactttattttgatgagtgaagggttaaaagagatacactacctttctccttatttaagacctcgcctctctcacccagaaaataatcattaatactgtatttaaaattctgaacatcctgtttgaggcaaaatatttgcagagtactgcttcttttgtatgtttttccagagatactctgtatatgcaagcatgattattgtctcttatctgcataggaatagatattaaaagtattattactgtaatatattcatcatattcttaactttatgtttagacccctcggagacagaaaaaactcttttgccgctaccatgatggaaaccgtaatcctaaatttattctggctccagctaaacaggaggatgaatgggacaagcctcgtattattcgcttccatgatattatttctgatgcagaaattgaaatcgtcaaagacctagcaaaaccaagggtaaataatgttttctttctttctcctcaatttactgtacctttgtatcaatttttctttgtaaaaaaataggataattgatatacgaataatgccacagattttttaaagatattttgcctcagcataatggagttactaatgatgctgtgtttatgccagtttttccatttgttatcaacacaagtaatgtacccttaactgggttttaagcactgaattatgaaaattattgtgagatttttattcaccattaacaaatttgtgtttcactgtcttcctgataaacttttctctgtattttggagtcttttaatctcagaggctactcaaagcccagctttttcacttctgtatttttactgaaagaataccgtggaagtatttttattcccttttaggcacattgttactattataaaaagatataattgggcacaagtattatgttaatttgaaatggtgatagttttctgactttaacccacagaatttatcttaaaaagaaaaagaatctaacgtaaacccaatctataagcttagtgttgagcataaaaactctttagtgagaatgtggaaaagactaccctttatgctcttgccttttcccccatcagcttgttcttaaaacatatttggtcttcttgatagtaaaatacaagctgccatcactttcataaagagattgttgaataaattctaggcatgctttgctgtcttacacaggagttggcagattttttccataaaggtcaatattagatattttttaggctttggaggccatatgatctctgtcatgactatttagttctgccattatagtgcaaaagcagccaaagaaaatatgtaaatgaaagagtgtggctatattacagtaaaattttatttccagtggcaggtagcaggctgaatttggtctgtggccatagtttgttgacccttattatatcaaaggtttgaattatctggatatctatactacaaaatgaagttagaatttcttttagagtttttctgcttctccaaattggtggttttttttttttttggccaaagattacattataaatgcaaaagactggtctaacattaatatatattattggtgccatccaaggtaattaattcatttcaacttggagatcaagttatattctggagattcctcaatttggattgtttttgatcaataaatttaatggcaataaaatttcatgctctcacaacctcagaatcatcgttccattaaaaaaaattgaaattattatctaggcggtcacctctttcttgctgtttttaacatttatgagctcttttcctctgcctttgttctcagtccaagattatttcactgtatatgttaatgagagtggctatcttgaagggacaaaagattgaccttaaaatgaattttaaacattaacctgtgcaaacagttccatcactaaaaaaaattaaagtcaaaggttttggaatggatcattaattgcaaataggcattcttctttttttccccttctctccccacccccagatggctattttaactgtaaattagacttcaaattttagatatgtctctttttcttactgtcatgtcctttcaccattgaaagaaatttaatttccaatctcttttgtttgtatgtcctccatctatgcaaaacaaaaaattgaagaaaaaaaaaaaaccccaaaaacctaaaaaactaactggctttcaaggctcagcacaaggtgactggaagtgtatggagttattttctctttttagcctcctttgtaaaaaccctggaattctgactggttgggtaaatgtgattcagttttttgttttgtaatgcaactattttgatggttggcttcacagctgaggcgagccaccatttcaaacccaataacaggagacttggagacggtacattacagaattagcaaaaggtaagagatgtgtatgctgcatattttgccctctaatgagtgttttatacatcttacaggaattattcatttaaggaaagtgggtcattttcagtcaccagctcaagtcaccaccctgtatataaacaggataacgcatggataaactgctttgtgtttcacaggtctttctccttcactagaagttctgtttttaacctttaattggtatgttatttttagggaattaatatgctttttatctttcttcagatcaggtgtcaaatatccaggaagtggcctgatacttgttttmtttttcccttttgttgccaaagggggaaataaagcagcagcctcctgaatctgggagtagtagtcttcacctatgcagttttctcatattcataaatgctgcggkgattcatatcctccttcatggtgattacgttggcatttgttcatacatcttgtaaaataacattgtcattatgtagtaatctgtattcctcctgtttgagttttttatttaaaaaaattcgctgactcaaaagttggcagtaggaagaacagagttacgcttctgagctctgtcttccaaaaattagttgtaaacttagttgccttttactttgccagagagatttaaaaacagttttatctcagtgagaggtttgaaaaatgaatttaaggagtctactattttttttcaaaatatttaaataacttctagatctgagaaagtttctgtgaaacccagtgctataaatcatttacatacagcttcaaatgattttttgtttaaaaaaagtgaaaggacaataaatctacaacaaaaatctgtcaactcattttctcttgatttggaagtggctgttcttactgccacttttctaaatgtttttgtggattcgagaccattacccaccatccagaccaatctgaacccttccaatcacctgtggcttggcaaaacaaaacaaacaaaaagcccaaaattgcctgctactggagtaagtccttgtcctttctctttttttgtagctgagccgagctacagtacatgaccctgagactggaaaattgaccacagcacagtacagagtatctaagaggtaagggagtaatggagagaactttagtcatatttggaccatttctttcttgggaatctaattttctgaaaactcatgatatagtttctaagacctaggtggttaggcatagatgtttgataatatctgtgctggagttttcatgacggactaataaacrtggttatggggcagttaataggggttttccaaagtaayattaacttacataatgtctgttgaggctccccaaactttgataagtgaaatgtgttctcatattgaactaagagaagttcccaaattcccttcattaaacaaggcctcttttggactctgcagtaaagcaggggtttaaaaatctcagggtcacctagtagctgcaggtattgcgtaagtaagtgcctttataacaaagcctttgcaagttccttgcttttaacagtgtttaaagataatcttattaggttattagttgattgatcactaaaatgttttttaaaaagagctcactgtgtaacttagagctcacagaattgggtgacagtattacaatagaactccttttccatctacttgtgaaggtttctcggctctcatgaaaatagaaatatctttgtgctgaatttttattctaacaagtagaatatttatccacagacacaataactaatgaaatataacaaacataagccccatccatctcattaggaacatcttaatacattttcacttgtttatacttgataatgattgtttagtcatgttatttagattaacaaatgtgaataataattatagtaacaatccagaagatactatctttaacacagcctttttataggtctttaacacaggctttttgttttaggaaattcatatttttgttaattgtataaatatttttaatatagataagtataatgtgataaataaaagattttcaggcataaaaatgtgtcactgtaggacaaggtttcttaaccttatcaatagcactattgacattttgagtcagataattcttgttcttgggggctatcttcagctttgtaggatgtttaatagcatctgtggttcactggatgccagtagcacccttccttaagttgtgacaatcaaaaatgtctccagacattgtcaaatgtcccctgataggtaaaatccccaccactacctctagtgactccacccctgttgagaattaactgttctaggataagaatggaatgaaactataacatcaagaaaaaaaaaaaagatgtaaaatgtccaagtattaaaaaatattttgttcacatattttaagtggatgatggtggatatcaaatcattatggtatttagattccagtggatacatttaaagtaatcattttttagaaattaccaacgttttcaatatgacaattcaatcattcgaaactaaattatgaaaaaatttagttgtcaactaaaaaatttatgcaaaggcaaacatagattttaacaggcattttaggaggtactcagagaaattttgaagattactgctgtcttcaaaaagaaaaagattaggctggaccgaatgcgttgattcagcatttcctttttcttttttgggcaggaccatatgccttttatatattaaccttaaacgttactatacacgtcttggtttcttgtctctgctgtataacaccacctgcccttttgccccagtaagagagaaaaattttttttcttgcctatcactagcttcatagctgagacccctataacaaaagacagattaacaagagaaaatcatacaaatttatttaatacaaaatttacttgacaagaagcctttagaaatgaagaccgcagcctgagcaacatgttaaaaccccaactctacaaaaaatacaaaaaaaattagccaggtgtggtggcatgtacctgtagacccagttacttgggaggctgaggtgggaggatcacctgagcctgaggaggttgaggctacagagagccacagtgagccatgagcatgccactgcactccagccagggtgacagagtaagatcctgtctcaaaaaaaaaaagagaaaagaaatagaaaaaaatgagaacccaaagaaacagggaaacctgtgtatttttatgctaggtttgatgagtggatagtcatacagaagtatgatgaacaaaggggatatgatctaatggtaataaactgggggaaacttagcaaagcctgtttgttcacatacctcttggtatctctgtgtctcaggataaggatgttcatttcttccaggtagagagaggatacttctggattgaaagtcttatactactttagaggaaggtcagagaattctttttttttttttttgggggggggatggagtcttgctctgtcgcccccaggctggagtgcagtggcgcaatcttggctcactgcaagctccgcctcctgggttcatgccattcttctgcctcagcctcctgagtacctgggactacaggcgcccgctgctgcccggctaattttttgtatttttagtagagatgggtttcaccgtgttagccaggatggtctcgatctcctgacctcgtgacccgcctgcctcggcctcccaaagtgctgggattacaagcatgagcccgtgcctggcctagacaattcttttatagcctgcttaaggggaaaagagtgggagaaggtcagagagacctgcttctgctcaaatgctacagtgccatattttggggttgagtgtcctgaaccccattagaagacatgaagaaaatttaaatttgccataatatgattttcattttaatcacaggagcaattatccttaaggaacactaatagatagtaaggatttgcagaaactaatttgcatagacatgttttgagatatgatttacagtgcttctgaacattgcaattaacccgatttttacattaagctaattttccattctattacagaacctaattcatatctacaaaaaaccccttctttaaaaaaaataaaaattaaactgttaacagattttatcagattattgcatggttttacacattttttgtcataaagtttgtaaatagctaaatcctctagatttgcatgcttctaggaagcatataaaacaaaattacggccaggagtggtggctcacgcctgtaatcccagcactttgggaggccaaggtgggtggatcacaaggtcaggagatcaagaccatcctcacaaacatggtaaaaccccatctctactaaaaatacaaaaattagctgggtgtggtggcgcgcctgtaatcccagctactcgggaggctgaggcaggagaatggcttgaacccgggaggtagagattgcagtgagccgagatcatgccactgcactccagcctggcgacagagagagatccatctcaaaaaaaaaaaaaaaaaaattcatgaattcgatgttttggaagactgtttgtttttggaaattttctatgtatgcaatgacccttttgaagaaatatccagcccacagtcaatggactgttgccaataaatcaaaataaatcactgtaggaaagtgatctatacacttaaaaaaaaaaactaaatattgctaaacatttcaaacctattttttaaatattctaactttgtagctcttaagcagttttattggatttttgagaaaggtacaaccatacttacatattataaatgatagcagaaggtatttagctactagcattagaaggccgggcatggtggctcatgcctgtaatatcagcactttgggaggctgaggtgagaggatggtttgagcccaggagcttgagaccagcctggatagtatagctagaccttgtctctatttacaaaaaattaagaaaaaaattagctgagagtgatggtgcacgtctgtagtcccagctacccaggaggcttaggtgggtagatcacttgagcctgggaagcagagattgcagtgagctgagattgcaccactgcactccaggctgggtgacagagcaaaaactctgtctcaaaaaaaaaaaaaaaaaaaaaaaaggccatctcagttgccaaatggaagaaaattcgtgttctgatgtcagttaatttaatcccttgtagcctgggaacatctgtattttgaatgatttagaaaggaatttcaaatatctgtatttagagaactgtctaagcgatgacatcactttcagtggaagtaataatttgttccagcatttcagcaaatagaatttttttggcaaaatatttttggaactcctttagtatttaaaaaacataaaacaggcggggcatggtggctcacgcctgtaatcctagcactttgggaggcccaggcgggcagatcccgaggtcaggagatcgagaccgttctggctaacacagtgaaaccccatctctactaaaaatacaaaaaaattagccgggcatggtggcgggtgcctgtggtcccaactactggggaggctgaggcaggagaacggcaggaacccaggaggcagagcttgcagtgagctgaaattgcgccactgcactccagcctgggcaacagagcgagactcaaaaaacaaacaaacccataaaacaaaaaaggcttttttttttttaagaggcagggtcttgctctgtcatctaggcctaagtccagtggcatgatcatagctcactgctccttccaactcctgggcagaagtgatcttcctacctcagtctcccgagtagctgggaatacaggtgctcaccaccatgcttggataatttttaattttttattttgtagagacagggtttcactatattgcctaggctggtctcaaactcccgggctcaagtgatcctcccagagtattggtattacaggcgcgagccattgcatccagccaaaaaaggctttacttatgttactgacaatctgttaacttttggcaagtcatctctgtcttttccactattaaaaagcaaataaaggccgggcacggtggctcacgcctgtaatcccagcactttgggaggccgaggcgggcggatcacgaggtcaggagatcgagaccatcccggctaaaacggtgaaacctcgtctctactaaaaatacaaaaaattagccgggcgtagtggcgggcgcctgtagtcccagctacttgggaggctgaggcaggagaatggcgtgaacccgggaggcggagcttgcagtgagccgagatcccgccactgcactccagcctgggcgacagagcgagactccgtctcaaaaaaaaaaaaaaaaaaaaaagcaaataaaaaccctaagaatttactacagcttgtaaatgaaaaagctaataattttgggtagatcagagaaatggaatttgaagtttttgaaatgtaaacattcagttttgtgctctgaaaagatagttaagtgaactcataaagtctagttaaagtaatataaataatgacctatgcaaataaacaataatctgtttagagtggtagaaaagcttttttgattctggtgggaaagtgattttcatttttttactctgaagtgatgatttcctacaatacggtatttatgatatcatgaatgtaacatgatatatatgtatatgtgtgtatttatttatttattttattttactttattttctttcggagacagggtctcactctgtcgcccaggctggagtgcagtggcacagtcatggctcactacagcctccacctcccaggctcaagcaatcctcccacctcagcctcctgagtaactggggctacgggtgcacaccaccatgcccagctaagttttgtatttttgtagagatgcggttttgctttgttgcccaggctggtcttgaactcctgggctcaagtgatcatctcaccttggcctcccaaagtgctgggattacaggcatgagccaccatgtctggccttaaatatatcataaatatgttatttaggcttaagattttgtttacccttgttactaaggagcaaattagtattaaagtataatatatataaacaaatacaaaaagttttgagtggttcagcttttttattttttttaatggcataacttttaacaacactgctctgtaatgggttgaactgtggtactcagactgagataactgaaatgagtggatgtatagtgttattgcataattatcccactatgaagcaaagggactggataaattcccagtctagattattagcctttgttaaccatcaagcacctagagaagaattattggaaattttgtcctctgtaactggcactttggggtgtgacttatcttttgcctttgtaaaaaaaaaaaaaaaaatatatatatatatatatatatatatatatatatatatatatatatagtggttttcgattagctaatcatagaatattcttatgtgtgtgtcgggttagaagaaggtagtgatcatgttcaaattacattactgacatttttctttggagctttccttactcacatattagaagtgtagttttgcagtgtgagaatgttgctcccttactctgcgcattctagtggtattttacaaaatcatgaagtttwttttttttttttttaacagcggaaactcagtagaaaggaaaaaagcatagaaatgttactctaattgaatgcacagctttggcttcaggtcctgtcattaaggccaaaaggaacatactttgggctatttaatttttaatggaaaaaaaaggacacatataaagttatctgaagaaatagttcttttttctcctggcactaaattgtgttttatggggaaaaacactgtataattagttgacattttcaattacagttatacaaaagataaatgatcttcaaatgatttttcctattaaatgctataacattaaaaaaaaatcccaactcagttaaagcactgggtactagaaagcaaaacctctggatttcttatgatttaatctaacacaggaataagacttccaggtcctagaagaatggacagttaacatacattacagtataatggtctccactgaattttagtaatgttacaatgtaaattcagagctgagtttttagataacctattatgtctataataatgtcactgaagacagattagcagtaattgttaaggatgggatccagatgagtaacttgaagatagttcttaaactaaggaaagtcttaatgtattttgggccaggtgtgacggctcacacctgtaattccagcactttgggaggtcaaggcaggtagattgcttgagctcaggagtttgagaccagcctgggcaacatggtgaaacctcatctctacaaaaaaatacaaaaattagccgggcgtggtggtgcatgcttgtagttccagttactccggaggctgaggtgggaggattgcttgagcccgggaggtagaagttgcagtgagtcgagatagcgtcattgcactctagcctgggtgacagaaccagactccatctcaaaaaaaaagggagtgttactatattttggaggggattttacatgaaagtcaaattaaatgaaataacttcccatgcatcagtagaattcattttcctctgtagtgactacaacagaactacaattaagatgacagtttgacagttattttttttttaacctacaatcaacattggttttaactgctaagcctcaaacccttcatcaagatttttttttttttttttgagacggagttttgctcttgttgcccagactcgagtgcaatggcgtgatctcggctcactgcaacctctgcctcctggttcaagagattcttctgcctcagcctcccaagtagctgaagttacaggtgtgcaccttcacacctggctaattttgtatttttagtggaggcggggtttcaccacgttggtcaggctggtctcgaactcctgacctcaagagatccacccgcctcagtctcccaaagtgctgggattacaggcgtgagccactgcgcctggccgagatatgttatgatataacaagaaatgcaaataaaaacttaaaaaatttaaaccattaaaatatttttgccttgctaagattgacaaagaataaaaggattgaaactggcaagggttttatgaaatgggtaggtgtaaatcattgcaactgttttggagggaaatttgacatttatcaaaatgtaaaagtcatttagcaattccacatctaggaatttatcgtacagagatactcccacaagtgtgcaaagatatagcattttgttacaatattgtttataacagagaaaaattagaaataacctattatttaaccagtacttaattggtagactttcatggccattcctggaattaaaagtttgtggtggtgttctgttgtttttttaagagatgaggtctcattctgttgccaaggctggagtgtagtggtgtgggcatagcaacctcgaactcctgggctcaagcaatcctcctgcctcagcctctaagtagctgaaactataaacctgtgccaccacaccttgctcattaatttattttaattttttttgtaaagacggggtcttgctatgtttcccagactggtcttcaactcctatccccaaacgatcctcccaccttggcttcccaaagtgctgggaggttattagattttttttttttttctaaaagcagtagtttaaaaggcagtgagggatgggaatataaagtggtgtcactgctgtggaatatagtctgccagctcctcaaaaagtttagggttaccatgtgatctagcaattctacttctaggtacatacccaaaataatttaaagcaaggagtcatatacttgcacacctatgttcataacagcatttattcactatagcccaaggttagaagcaacccaaatgtccatcaacaaatgaatggataaacatgtggtatatatagataatagaatattattcagccttaaaaaaggaaatgaatttctgataccctgcttataacatggatgaaccttgaaaacattattttggctgggtgtggtggctcacacctgtaatctcagcactttgggaggctgaggcaggcagattgcctgagtccaggagtttgacaccagcctggtcaccatgatgaaaccccgtctctactaaaaatacaaaaaactatggtggtgcatgcctgtagtcccagctacttgggaggctgaggtggaagagtcacctgagcccggaaggttgaggctgcagtgagccaagattgcatcactgcactccagcctgggcaactggagttgagaccctgtctccaaaaaaaaaaaaaaaaaccacacacacatgttaagtgaaataagctagaattgacaaatattatatgattcttcttacaggagatacctagaataggcaaatccatacagacagaacgtagaatagaggattaccaggggttgtgaggagggagagatgggagttgttgttcagtgggtacagttttctgtttggttttgatgaaaaagttctggaaatggatagtgctgatggttgtaaggtattgtaaatgtacttaacaccagtgaattgtacacttaattaaaatggtaaaattgctgttatatatattttaccataatttaaaaaatagtctaaatggctaattttatgttacatgtattttaccacaaatttttatttttttagagataggttctcattctggggcccaggctggagtgcagtggtgtgattgtagctccctgcatccttgaactcctgggcttaagtaatccttccgcttcagccttatgagtagctaggactacacaggcacacgctaccatgcctggctaatttttaaactttttttgtggagacagggtcttgctaggttgccgagactggtcttgaactcaagtgattttcctgccttggcttcccaaagtgctgggattacagatttgagacactgtgcccatcctgtttaactttcctgatgttattctttgaagcataaaaggtttttatttggataatgtcccatttatttattccttttgttgcctgtacttttgatgtcatagctaaaccattgcttcgtccaacgtcacaaagatttgctcctgtgttttcttcccacagtttttataattttagcttttacatttaggtctttgatccatcttgagtaattcgttttaatataatgtgaagcagaggtccagcttctttctttgcatgtagataaccagtgtcccatgaccatttgtggaatgtaacaagcatttcttacttttgcagttttaaaggagtaaagtgaaagactggagtggtaatttgctagaatggctaaagtgaaggtatttttcttggtagcaggagacttcaataagcaagcattgacaaggaggagattaaagataaaagggaggcaataactgctggagtaaggcatctagagttagaaagcatagaatcaaaagcatagatagaaagtctgcctctataaggctgaaggacgatgattctaccaaagtacaagaggaaaagataagactagatatttaaaagttgttggtagcagggagggaagttgaagatatcagaagacacgttctctgtgggtgataggttccaggatggaataggaacagtttgttcatgaggcatttagttcgaagctttattagaatgctttccaatttagcattgcaattacctgtaaaaatcaagtcagtagttggttggttgcttataaagttcagacatccatcaaattgtgctaggcaggaaagacaggtacattgacatataccagattagttctaccaggaacttgggcagaattagaagaaaaaaattcttaatatacttaatcagctatattctttacaacaataacactttgattcttcccatttttgctacactgaggaattctgtaatactcagccagtcccaaaaaatttgcaagatatcaccaagcaaataattttagtaatataggataaatctaagaatccaccctgtttgtcatgttagtttcatgttggtaatgattagtaaaaacttctttcttctccatgtctttctcttgttaaagaaaaacccacacactctctcttgctctctctcttacgcttgctcgcttcctttgtctgtctgtggaagctttggcttcgtctggcagcgggagaggtaaaggaaagcttctctaaagaagtggtaactaaggtgatatccagagtcttaattttgcaaagtgaaaaagaatattctgggcagagagaagagcatacgcactagccttaggcctagaggaaatacgttcttgaggaaatgttgctgckgtcctgagagggaggcagaatatagtgttggaggctgtaaattaggagaccaagaaaaagcagcctgagatactagaggaattcctggagaatgagtgtttgagagagtttccaaaaggatgagtattgtcacaaatgttaccaaaggaacaaatacartgagaattgaaaaatgtcattagatttagaagcacaatagggctgtgggtaagattagcaagagcaattttgagggagtgatataagtgactaaagctagattacagtgggttcagagattaggaatctgacaaagttagcttgaagagggaaaagaaagattggtaactggagggatgtacagatttggggaaatcatttttaattgtaaaggcgtttatttgctctatgaagtaggaaatacattatctactgagtgaagggagaggctgaagtgagttagggtacagagtggaagaggaagtaaagtgaagagcccatttgaagttggtattcatgaatttttagtggaacatatctgccctatttcatgactttctccagtagggtttggtgacagagatatacgcttagataaaagagattgatccaggattgtttttgccagacagttgagtttaggcgtttagaaagaatgttaaaatgatgaactatggaatcaaagctcagtgagaggagaagtgaagaaagcgaaggactgattgactgcttaaaagcatatgtgaaaaagggatatagctgaatttgggagtaccatttaaaattgagatatagttcccgtatcataaaattcacgcttttaaagtatgcatttcagtggtttttagccttgtgcaactataaccaatgtctagttccagaacatttttgtcactcaaaaaaaatcctgtacccattaggagtcatttcccattccccccagccccatccccatcccctggcaaccactaatctattttctattatctattgatttgtctattctgtatatttcatagaagtggcattatataacatgtggcctttgtatctggcttctttgacttaatatgatgttccatccatgttgtagcatgtatgtagagacagggtctcactctgtcacccaggttggagtgcagtggtgtgatcataattcactgcagcctcaaactcccatgctcaagcggctctcttgcttcagctgccagagtagctggaattacaggtgcatgccaccatgcccagctaattttttaaatgttttgtagagttggggtctcactgtattgcccaggctggtctcaaactcctggcctcaagagacctttccacctcagcctcccaaagtgctgggattacaggcatgagccactgtgcctggccagtactttattcctttttgtgacacaataatattccagtttatagatctatcacgttttatgtatccattgataaattgatggatatttgggtagtttctactttttggctattatatgtaatgatgccataaaaaattctgtacaagttattgtatggacataagatttaatttctcttggatatatacctagaagtaaattgctgggtcatttgataactgtgtttagcattttgagcaactaccaaactgttttccaaagtggctgccccttttacattcccattagcaatgtatgagggctccagtttcttcacatccttaccaacacctgttattgtccatccttcagtaggtgtgtttgggtaacttttcaaaacttaagcagtaagcagaatttttttcttataaaatattagcattatgtagctcagactaaagaccccatgacttccaccatagtcagttcctataccttacctggaaagaacgttgttttgtttggtatggttttttaaagaattttttgaagttctcaatgtaggtggctttcaatatagcctccttacattaatccamctgttttcatataagcattataataaatttgattagttttttccttcccaacctctaacagtagaatgtgacatttaaaaaaaattacaatatccattaataaagatgatactaagcaagaaaatgaactaaatgccttcagtaaaggtttattgtcctatatattaaatattatggctttaaaaataacagctattagtctccatgtaatgaaacattatcaataaaactaatattcctcttattcttagtgcctggctctctggctatgaaaatcctgtggtgtstcgaattaatatgagaatacaagatctaacaggactagatgtttccacagcagaggaattacaggtaggtaatcacattatccttaagtcatttttacacttcaggagatgcttgagaggagatttcctgacactgaacaggcagtcctcaatttgcatgatagtttgggaccttaaaaagtgaccctgtaagctgcaaccatgcaaagtgattttaataatgggaaaaattgtgattgttctgtgacttttaaatttcttgtcaaaacatgaaaactcttatctagggaaatgaaaaatatagatcactaatacttactaagtacactgtaattttttttctatcccccaggcctcactttgcctgtcaagtggccagggtgggttttaaaaaatagtgggtttttttcctttttatttatttatttttaagcaaacagttttcctttatttgtaatagtgaaacataggacttttttcatcacttctctttttctgttacttttatgtctataaatcatttgtcatcaaaagtagctgtcccaaaataattcttcttcactccgtcataatcacaacttgactcaaaatatctgtagtaaacaggtatatataggaatgttagttatagggaataaacataaaatccatgtataataatctcacttggtttcaatagtaaaaaaaaaaaactaagcataggcctataaaccagagaaaagaaacagcttagtcttcccctttgtcagcgttatttactattccttagtcttttcctgtagaaaaatactttttaaaatatttgagttcccttttctgtattagattttttttttgaagttatcaaaatgtgcactaaaaaaaccaatgcctttattttagcctttctggttgcaattttttttttttttttttttttgagatggagtctgagtctggctctgtggcccaagctggagtgcagtgacatgatctcgactcactacaacccctgtctcctggttcaagcgattctcctgcctcagcctcccaagtagctgggattacaggcatgcgccaccacactgagctaattttgtatttttagtagagacggggtttcaccatgttggccaggctgctcttgaactcctgacctcaagtgatccacctgccttggcctcccaaagtgctgggattacacaggcgtgaggcactgtgcctggcctggttgcaaaattctaagacagatgcagtcaatatgcagctcataaattcattagaaaggtgatacttttgcttcttttcaacctttctttttctttttgagacagtctcactggagtgcagtggtgcaatcttggatcagtgcgacctctgcttcctgggctcaagtgattctcctgcctcagcctcccaggtagctgggaccacaggcacatgccgccacggctagctaatttttgtatttttagtagagatggggtttcaccatgttggccaggctggtccttgaactcctggcctcaagtgatctgcctgccttggcctcccaaagtgttgggattacaggcatgagccannnnnnnnnnnnnnnnnnnnnnnnnnnnnnnnnnnnnnnnnnnnnnnnnnnnnnnnnnnnnnnnnnnnnnnnnnnnnnnnnnnnnnnnnnnnnnnnnnnnnnnnnnnnnntggatcacctgaagtcaggagttcgagaccagcctgaccaacatggagaaaccccgtctctactaaaaaatacaaaaaaattagctgggcgtggtggcacatgactgtaattccagctactcggcaggctgaggtaggagaattgcttgaacccaggaggtggaggttgcggtgagctgagattgcgccattgcactccagcctgggcaacgagagcaaaactctgtttcagaaataaataaataaataaactgttaatttatcagaagaccaaaatgtattcttaaagacagttaattccctttttctaattaagttttaaaaatgtattttktgtgtgtgtgtgtgtgtgtgtgtgtgtgtgtgtgtgttttacagtgacacggtttgatgccatcctactccgtctttgtcagaacacgtggtcttttcttctgtttttttttcctatctcaaaattatgaaagcttttatttataacgcttgcagttttttaaaagtgagattcataaaactgtgttcacccaacacactgaatcctatcatgacttggcatgaaaaacagcaacccactcagagtccagtaacactgtgccctcccctgtgatgcacacctgccaggtttattcagtgtttgactgttgttcagtattcatccaacaacatttttgatacatgtggtgctaaatgttgggaatgcaaacctgaataaggtatcgtcctgattcctgcctaatggttttcctgggtttcactggctatgatttctgattcttccctccctccctctgtccctccctccctccctctctccctccctcccctcctctctccctcccttccttcctctctctctcccttccttccttccatatttccttccttccatgtttgcttgcttccttccttccttccttcccttccctccctccctgcatccatccttccctcctttcctttctttcttctctctcttcctccctcccaccctctttatttctttacttccttccttcctctctccctcccccctccccctccctgactcccttctttccttccttccttccctttttttttttttatactttaagttctagggtacatgtgcacaacgtgcaggtttgttacataggtatacatgtgccatgttggtttgctgcacccatcaactcatcatttacattaggtatttctcctaatgctattcctcccccagccccccaccctccgacaggccccggtgtgtgatgttccctgccctgtgtccaagtgttctcattgttcaatttccacctatgagtgagaacatgtggtgtttggttttctgtccttgtgagagtttgctgagaatgatggtttccagcttcatccatgtccctgcaaaggacatgaactcatccttttttatggctgcatggtattccatggtgtacatgtgccacattttcttaatccagtctattattgatggacatttgggttggttccaagtctttgctattgtgaatagtgccacagtaaacatacgtgtatatgtgtctttatagtagcatgatttataatcctttgggtatttacccagtaatgggattgctgggtcaaatggtatttctacttctggatccttgagaaatcaccacactgtcttccacaatggctgaactaatttacactcccaccaacagtgtaaaagcattcctatttctccacatcctctccagcatctgttgtttcctcactttttaatgattgccattctaactggcatgagatggtatctcattgtggttttgcttcgcatttctcttatgaccagtgatgatgagcattttttcatgtgcctgttggctgcataaatgtcttcttttgagaagtgtctgttcatatcctttgcccactttttgatggggttgtttttttcttgtaaatttaagttctttgtagatctggatatcagccatttgtcagatgggtagattgcaaaaattttctcccattctgtaggttgcctgttcactctgatggtagtttcttttgccatgcagaagctctttagtttaattagatcccacttgtatattttggcttttgtagccattgcttttggtgttttagtcatgaagtccttgcccatgcctatgtcctgaatggtattgcctaggttttcttctagggtttttatggttttaggtctaacatttaagtctttaatccatcttgaattaattgttatataaagtgtaaggaagggatccagtttcagctttctacatatggctagccagttttcccagcaccgtttattaaatagggaatcctttccccatttcttgtttttgtcaggttcgtcaaagatcagatggttgtagatgtgtgttgttatttctgaggcctctgttctgttctattggtctatgtctctgttttggtaccagtactatgctattttggttactgtagccttgtagtatagtttgaagtcaggtagcatgatgcctccagctttgttcttttggcttaggattgtcttggctatgtgggctcttttttggttccatatgaactttaaagtagatttttccaattctgtgaagaaagtcattggtagcttgatggggatggcattgaatctgtaaattaccttgggcagtatggccattttcacgatattgattcttcctatccatgagcatggaatgttcttccatttgtgtcctcttttatttcgttgagcagtggtttgtagttctccttgaagaggttcttcacatcccttgtaagttggattcctaggtattttattctctttgtagcaattgtgaatgggagttcactcatgatttggctctctgtctgttattggtatataggaatgcttgtgatttttgcacattgattttgtatcctgagactttgctgaagttgcttatcagcttaaggagattttgggctgagacaatggggttttctaaatatacaatcatgtcatctgcaaacagggacaatttgacttcctgttttcctaattgaataccctttatttctttctcttgccttattgccctggccagaacttccaacactatgttgaataggagtggtgagggagggtatccttgtcttgtgccggatttcaaacagtgcttccagtttttgcccattcagtatgatattggctgtgggtttgtcataaatagctcttattattttgagatatgttccatcaatacctagtttaccgcattttcagcatgaagggctgttgaattttgtcaaaggccttttctgcatctattgagataatcatgtggtttttgtcattggttctgtttatgtgatggattacgtttattgatttgtgtatgttgaaccagccttgcatcccagggatgaagctgacttgattgtggtggataagctttttgatgtgctgctggattcggttggatttttgcgtcgatgttcatcagcgatattggcctaaaattctctttttttgttgtgtctctgccaggctttggtatcaggatgatactggcctcataaaatgagttagggaggattccctctttttctgttgattggaatagtttcagaaggaatggtaccagctcctcttagtacctctgatagaattcggctgtgaatccatctggtcctgaactttttttagttggtaggctgttattgcctcaatttcagagtctgttatttttctattcagagattcaacttcttcctggtttggtcttgggtgtatgtgtccaggaatttatccatttcttctagattttctagtttatttgcatagaggtgtttatagtattctctgatggtagtttgtatttctgtgggatctgtggtgatatcccctttatcattttttactgtgtctatttgattattctctcttttcttctttattagtcttgctagctgtctatcaattttgttgatcttttcaaaaaaccagctcctggattcattgattttttgaagggttttttatgtctgtatctctttcagttctgctttgatctgagttatttcttgccttctgctagcttttgaatttgtttgctcttgcttctcttgttcttttaattgtgatgttagggtgtcgattttaggtctttcttgctttctcttgtgggcatttagtgctataaattttcctctacactgctttaaatgtgtcccagagattctggtacgttgtgtctttgttctcattggtttcaaagaacatgtttatttctgccttcatttcgttatttacccagtagtcattcaggagcaggttgttcagtttccatgtagttgtgtggttttgagtgagtttcttaatcctgagttctaatttgattgcactgtggtctgagagacagtttgttgtgatttctgttcttttacatttgctgaggagtgctttacttccaattatgtggtcagttttagaataagtgtgatgtggtgctgagaagaatgtatattctgttgatttggggtggacagagttctgtagatgtctattataatggtctgcttagtgcagagctgagttccagtcctggatattcttgttaaccttctgtcttgttgatctcatattgacagtggagtgttaaagtctctcattattattgtgtgagagtctaagtctctttttaggactctaaggacttgccttatgaatctgggtgcccctgtattgggtgcatatatatttagaatagttagcacttcttgttgaattgatccctataccattacgtaatggccttctttgtctcttttgatctgtgttggtttaaagtctgtttgatcagagactaggattgcagccgctgcttttttttttttttttctttccatttgcttcgtagatcttcctccatccctttattttgagcctatgtgtgtctctgcacatgagatgtgtctcctgatgggtcttgactctttatccaatttgccagtctgtgccttttcattgggacatttagcccatttacatttaaggctaatattgttatatgtgaatttgatcctgtcattatgatgttcgctggttattttgctcgttaattgatgcggtttcttcatagcatcgatggtctttataatttggcatgtttttgcagtggctggtaccagttgttcctttccatgtttagtgcttccttcaggagctcttgtaagacaggcctggtggtgacaaaatctctcagcatttgcttgtctgcaaaggattttatttctcctttatttagaaagcttagtttggctggatatgaaattctgggttgaaaattcttttttttaagaatgttgaatattggcccccactcycttcttgcttgtagggtttctgcagagagatccactgttagtctgatgggcctccctttgtgggtaacccgacctttctctctggctgcccttaagattttttccttcatttcagccttggtgaatctgacaattacgtgtcttgtggttgctcttctcgagaagtatctttgtggtgttctctgtatttctgaatttgactgttggcctgccttgctaggttggggaaattctcctggataatttcctgaatagtgtttttcagcctgtttccattctccccgtcactttcaggtgtacaccaatcaaacatagatttggtctttttagatagtcccatatttcttggaggctttatttgtttctttctactcatttttctctaaacttgtcttcttgctttatttcattaattccatcttcaatcactgataccctttgttccacttgatcaaatcggctaccgaagcttgtgcatgcaccatgacgttcttatgccatggttttcagctccatcaggtcattcaaggtcttctctacactgtttgttctagttagccattcgtctaaccttttttcaagggttttagcttccttgcgatggcttagaacatgcttctttagctgggaggtttgttattaccgaccttctgaagcctacttctgtcagctcatcaaagtcattctctgtccagctttgttctgttgcttgtgaggagctgcagtcctttggaggagaggaggtgctctgatctttagaagtttcagcttttctgctctggtttctccccatctttgtggttttgtctacctttggccttcgatgttggtgacctacagatggggttttggtgtagatgacctttttgttgatgttgatgctattcctttctgttagttttccttctaacagtcaggtccctcagctgcaggtctgttggagtttgctggaggtccattccagacgctgtttgcctgggtatcaccagcagaggatgcagaacagcaaatattgctgcctgatccttcctctggaagcttcatcccagaggggcacccgcctgtatgaggtgtctgtcggcccctactgggaggtttcccccagttaggctacacgggggtcagggaccctcttgaggaggcagtctttggttctcagagctcaaatgccatcctgggagaaccactgctctcttcagagctgtcagacagggacgtttaagtctgcagaagttgtctgctggcttttgttcagctatgccctgcccacagaggtggagtctacagaggcagtaggccttgctgagctgtggtgggctccgcccagtttgagctttctggccattttgtttacctaatcaagcctcagcaatggtggacacccctcctccagccaggctgcaacctctcaggtccatctcagactgctgcactagcagtgagcaaggctccatgggcatgggacccactgagccaggcacaggaaagaatctcctggtctgccagttgctaagactgtgggaaaagcgcagtatgtgggcaggattgtccggtttttccaggtacagtctgtcatggcttccctttgctaggaaagggaaattccctgactccttgtgcttcctgggtgaggcgatgccccgccctgctttggctcattctctatggtctgcacccactgtccaaccagtcccaatgagatgaaccaggtacctcagttggaaatgcagaaatcccacatgtgagtgagaacatgtgatatttgtctatgctgggcttattttactaatataatgaactccagttccatccatgtgataagattacattcttcttatggctgaatagtgtttcattatatataagcaccacattttctttatccattcatctgttgatggacacttaggttgattccatatgttagctgttgtgaatagtcctgcaataaacatgggaatgcggatatctcttcatcatgctaatttcctttcttttggatatatacttggcactgggattgctggatcatatggtagatctatttttagtttttaagggaacctctgtactgttctccatagtgattgtactaatttacattcccaccagcagtgtatgagcatgcccctttctcttcatccttgccagtgtctgttatttttgggtttttttgtttgttttttcttgagatgtagtcttactctcttgcccaggctggagtgcagtggtgtgatcttggctcactgcaacctccacctcctgggttaatgcagttctcctgcctcagcctcctgtgtaactgggattacaggcccctgccaccatgcccagctaatttttatatttttagtagagacagggttttaccatgttggccaggctggtctcgtactcctgacctcaggtgatccatccactttggcctcccaaagtgctggaattacaggtgtgagccactgtgcctggccaggatgctgaatttttttgaaagctttttctgcatttgcagagatgatcatatggtttttaattctgtttatgtggtgaattacatttattgaaccaaccttgcaccccacaaataaagcctaattgattatagtaaattaactttttgatgtgctgctaggttttgttttctagtatttttttgagtattttgtgtctgtgttcatcaggaatatcagcctgaagttttcttttttcattatgtctgtgatgagttttggtatcagaatgatgatgctggcttcataaaatgagttaaggaaagattcgttctcaatcttttggaataatttcagtaggattgatactagctctttgtatgtctggtaaaattcagctgtgaatccatccagtccagagctttttttggttagtaggttgtttttttgtttttttgtttttaattaaaattgaatttcaatttcagaattccttattggtctgttcagggtttcagtttttttctgtttcagtcttgggaggttgtgtgtttccaggaatttatccatttcttctaggttttttataaaagtttgtgtgcatagaggtgttcataataatctctgaggactttttatatttctttggggtcagttgtaatgtcacctttgttatttctgattgtgcttatttggatcttttttctttgttaatctagctatcttgctgtttctagaattctttatttgtctttgatgtttgacaatctgactgaaatgtgcttcagaggggactttttttggttgaatctatttggggacttttgaacttcctggagttggatacccttatctcttccccagacttgggtagttttcagctattattaaataggttttctgtgccttttacctttcttctccttttggaactcctgtaatacaaatgtttaatggtgtcccagaagtcttgtaggctctctttatcctttttcattattgtttcctttttttttcccctctgagtaatattaaataatgtatcttcaggttcagagattgttttgcttaatcaagtgtgctggtgcagctttgtattgtatttttaatttcattcattgaattctttttttttttttttttctgagacagagtctcgctctgtcgccacgctggagtgcagtggcaagatcttggctcactgcaacctccgcctcccaggttcaagcgattctcctgcctcagcctcctgcattcattgaattcttcagctgcaagtgttttgtttggttcttttttatgatatctttctttgttgaaattctgattcatatcatgaattgttttcctgatttcattgaattatctatctgtattttcttttatctgtttgagtttccttaagatcattatttgaatttttttctagctaggtgttgatttcctttacatttgggcctgtaactagagagttacattctcagcagtgtcatatttcattgctttttaatgtttcttgtttcctgcattgatgtctgtgcatctagtggaacaattggctcttttaaactttccgcttctgttgggctgtttgggaagggtgtggtgactctgtttccaggtaggttcagtactgtagtctcttatagcctattcagctgcattcattgtcagaataactgtgggtgcctcaacagcctaggctggagaagtttgcagtggtggtagctgtggagtagattgttaatatcttcagtggcaagagcttttggaatccttccattcttgttttccccacaatagggagttttagccagtgggagtcktcttggtggcaggtcttacatatcctacaagcagctgccatggtgctgcaatccaggtgcaagcgtttggagtggctatggggctaggatcctgggctcagggtcttgcatactattgtaacacctgggtgttagggtacagggtcactattggcagggttggatgtaggttgcctatagtgccaggatctgtgactctgaggcaccctctagctgcttgggaaaagagtgtcaggttgtagctgtgagtctacccctggtggacagggcacagccctggcccaactccagggaagagaggatgctctggaggtttgagtctgggatgcagggtttggctctattaggagcctgagccaatagggcttagtggcaactcctatccctggggatgaggcaccatgatgaggtgccctggatgaggcaccaggttctagtagtcactctagaacctggattggtggagctcagatggatcccagactctgaggccaggtacagcaggaacaggcacccctgaatggccaagcatgcctgttgtttgggccctgtggggcagagagcagcacagcaatgacttcactccctagaaagagaagtgtctcagcagcgcagactctccagggaagcagggtactagagttatttgccctgcagggcacatttctcagcttagccactgctctgtttccctgggtctctgggtactacttcagccctgggatgtgcagctgctcagcttggccagtgcaacaattccccaagggtgatgtgctgtttcagctcaggctcaggggacgtgactgttctgggtggcccagacatctcatgggatgcagggttctgccaaagtactattttcttgggagggagtacatggctgcagctcctgcctcagggagttgggggaggggtgggtagagcagttccacctctcttgaccccaccaggaagggtgtaacagctgctggcagctctgcttgggaatgtcaggccttcaagtaggccttcattcctggcttagcttcagggatgaaggggtgctgtggctactggccccagagcaagacacactccagcagttccagttccaccagtattctccttctggtttcatcagcagcactcttaattatgttctcctttgattttgtcagcattttattgtgttgtgtgattgagggaaagagttaagtatcattctcttcactttaacaaataagaaaactgagatgatatccaaagttacattgtaattaagagagctggaacttgaactcagaccaaatatttttcttaaattttggtgcgtcacactgggacattgtcgtaagcaactgaagttgttagggcccttcgacaggaataattaaattggtgttaatttctttccttttttagcagggaaaaaatatgtaagaaaagatattttattaaagtggattgcgagttvagcatttggggctttggaaaacattttttgatttaagttccaaaggaaagtgtttagtgaaacaaaataatagaaatctcaaattttagcttatgtattaaatttttaaaaattagctgggtgtggtagcatgcacctgtagtcccagctactcaggaggctgaagtgggaggatcacttgtgccccaaaggttgaggctgcagtgtgctctgattgcatcactgcactccagcctgtctctggtggggggtggggaggggtacatatgtagatatagatctatatatatagatatctatatatgtagatctgtatagagatatagatatctatatatacatctgtagatatagatatctatatatacatctgtagatatagatatctatatatacatctgtagatatagatatctatatatacatctgtagatatagatatctatatatacatctgtagatatagatatctatatatacatctgtagatatagatctgtacatagatatatagtagctgtcctttgtttttcatccctgttttcataggaactcttgttgattttaaatatttttcatttctctgtaaatacctgaccatgatctataaaagtccaaaaaatgaggttcatagattttttttgaatagtaatctttatagttcttttctttcatgctttgtgtctttccttcaggtagcaaattatggagttggaggacagtatgaaccccattttgactttgcacgggtaagtgaaaaagaaatggagaaattcactgaggcttatgcattacattgtttgtctcaaaacaaaacaaaaaaacagtctcactctgtcacccaggctggagtgcagtagcacratcttggctcactgcaacctctgcctcctgggttggagcaattctcctacctcagcctcccgagtagctgggatcacaggcatgcgccaccatgcccagctaatttttgtatttttagtagcgacagggtttcgccattttggccaggctggtcttgaacttctgacctcaggtgatccacccacctcagcctcccagagtgctgggattacaggcgtgagccactgtgcccggccgcattacattgttaaagaaaaagttattcttgacacttgttaaagatggtaaggcagacttcattcaaggggggaccattgcgataggtatagggaccactgcaaatgcagtgggattttgcagtaagggagagaggttaagcccaattccaaatacaacaaggaaaagtgggaatttatagccaatgagcaagggtgggtgttagtagatggaaaattactaagaggtaagggaagattctggctaaactgacctaacaggattcttgctgaagtcagggaagagtgatcatcatccaggggatagtggaagatgaagaacccagttaggttttgagggtgatcacatggcaaggacggggaattctggctaacctgacttagcagggttcttgcttaaattggacaatgcagaggtaaataccagaagcccaaagtcagggcctacttgagaagaaagttcagaggagcctgagtagttgggtcaaggagagattctttgtcaacatgttaattctgttattttaacatwaaaaattcatagcctatttggaatttatggaaatacggtgtggcagatattctgtgaaacctttttaccagttaaaaaaaaaaaaccaaacacctagatacccaataaaatcacttaagatactttaaatgcattggcaagcctggaagaaagtaaagggtgttccaaaaggcaaactgaacaatgatcccaaacttagagaattaaagaggggacaaaacacagaggctggaggtatgtgcctccaggaactagagctttgggaataacagctctgtaagaggaggatctgccacagtgtaggctgctgaatttgagaccctggcataaactctaaatctccacaaggattacaccttcagtaaagaaagaatgggtttgaaaataaatctcttgtgatacaggagccttatggggaactgtctgtttccatcctggctggggcatagtgtgtatgataggggagctacttcagggagtactatgtatggaattttccacttgtgtcatgttagcactaaaagttttgaacttcagagcattttgcattttggacttttggtatgctcaacctgtattccatgttacggatataccacagtttagccattcacccatcgaaggacatttggatagtttttagtttttggctattacaaataaagatgtgtttacatttctatgtgaaaaatgcattttcatttttctgggagaaatgccaagaggttgtattgtattttaatttagatataaatatttagatattaattctttagcttgattatagtgctgaaagtcactttactagcattattagaaaaataatactaggggccaggcgtggtggctcatgcctgtaatcccagcactttgggaggccaaggtgggtggatcacttgaggtcaggagttcaagaccagtctggccaacatggtgaaactccatctctactaaaaatacaaaaaaattagccaggcatggtggtacacgcctgtagccccagccacttgggaggctgaggcagaagaattgcttaaacccgggaggtggaggttgcaatgagctgagatcatggcactgcactccagcctgggcgacagggcaagactctgtctcaaaaaaaaaaaaaaagaaaaaagaaaataatactaggaaatatttcagtaggtcgtgagttcaaagtaagtctcaaggtaaattaagcttcaggagtatagctaagagatggctgtcaagtcatattttttagaagctaaaattgtgggtatttgtttttaaaataatatgtagcttgcagataatggctgtcgtttaggctaataagtctgctttttatccagtaatcttgtctaaagtatccagtatacaagttcagtcatcacgtatttgaggccaggtacagtggctcacacctgtgatcctagcattttgggaggctaaggcaggaggatcgcttgaggccaggagttcaagatcaccctggtccacatagcaagactccatcttacaaaaagattgcctgatgtttatagtgcactggacattacaagggaaacttttgcggttgttgttggcatattcttcaggatattactactgatgtttagttgccactagagtatttgtattactgaatttttacaccattgaatttactgtgtttttattcacagaaagatgagccagatgctttcaaagagctggggacaggaaatagaattgctacatggctgttttatgtaagtygtcactaaaatttttagattaagttgggatttgatgacaagattcattttaatgttttaagtttgttctgtgtagctctgattcagcatcctagtttaacatttttacaactgaataaagtgagttaagaattattttgcacttgcaactttttcaggctataagatagatgttcattatagaaacttctggacaaacttagaatttatagtgccactacctgcagataatcattaatattttaacatatagtctctctgtttagtaatatataatatgtgtatataaaaatctctatatatttgaatttctatacatacacatacacattatttcagtaaacttctgaattacatttttttattgaagtatatcagaagagtgcgcaaattaagtattataacttaattttcacaaagtgaacacttctggtgtattcagtactaagatgaagaaatagcatattacaacccccagaaaccctatctcagagttttaaaacagtatgatcataattcaatttttaaaattgtttatatatttttatatatggaaaaaagttttgattgtagtgtttgttctagttaccccaaataaagcactccaaaactctcctttctgagtggtttaaaataacaacgattttcttaatgtatctctaacagttatgaggttgactgggctcaactcatggttcctgctccaaatctgacatgtatttgccgtcaaatgcctggcactggggtatcttgaaggctaaggttgaggctggctgtcagccagaatgcctaaagtctggccaatacatgtggctgagcttcttcacagcatagtgactggattgcaagaggaagcatcccaaaagaacaatgcaaaagtacatggtattgttatgacctaccctcagaagtcacagatgttaattttgctgtattctgttacagcaattacaaaggtctgcccagcttcaaggagagggcacacagaccctaccactgcagacraatgtcagcgtcacataaaaagagcatgtaggatgggacatattgggatgtattatatttggaaaatgcaatctgccataatgtcataacctttgttaacttaaaaaagatattttaggccaggcacagtgacacacgcctgtaatcccaacactttgagaggccgaggcgggcagatcacttgaggtcaggagttcgagaccagcctggccaacgtggtgaaaccccttctccactataaatacaaaaattagctgggtgtggtggcacacacctgtagtaccagctactcaggaggctgaggcacgagaatcacttgaacctgggaggcagaggttgcagtgagccgagatcgcgccactgcactctccagcctggataacggagcgtggctccatctcaaaaaataaaaataaaaaaaatatatatattttatatgtagacttaattttggttatttcatcactttttccattccttagccctatttgaattacatctttttgttgtctgtagtatctcactccctaccaaaatctgtctgttcagtctatttcctttttctcttgctaccttccctgtttgttttctttcccttcttccctatctccttcctctccgtatgcctccttttctccccaattcccaatttgtatttctctcacaactccatcttgtttccaaaaggaggtaaggtacattacaaagattcatataaaaaaagagaaataccacaaagggaaaaccaggagagggttagtacggtatacaaattcatgctgcaaaggcttgcatattttctagaggtgagtcttagaggttgtaccagtttatatcccaattttaagtgggatatgtttgtgaagtatgtttgtcagactttttgatctatgtatatttcacttattaaattagcagttattgtggctttaatttgcatttctcttattagagaggttgagcatcttttcagatgtttaaaagccattagtgtttatgtgttcctggttctgcttatatttctttgttttatgaatattgatgctgtattatttggcccactatctgtttctccctcttaatgtaaacacccttcctgtttttctaaaatagttgtatagcattttaattgattatcattttttccgttatttaaataccattcccagaggggcacatagaatatctcaaattacttttcctctcatgcacaactttttaatttcctcagagtttaattttttcattggttaagtgttcttagttctttactattagttatgtatttatcattgtaaaataccttctatctcatttaatgctttttaccttgatttaaactgtatctcatactaagatcatatcctgttttccttggatagcatttgcccaaaatcttacatttttgtgttctgtgtttgtaagtcacttgttttagatgcagctctgatataatatgtagctgggttttgctctgtgatctaatcagtctatacattctacttatgttgctttaaaaaaatctttatgatccatgtttcctttgccttgttttttgtgattctttggttaatttaaaaggtttccatttttattctaggttatctttatgactataactttatataatcctttaactttctcacttttatttaatatgtttgattcccttccatgagaaatggcaaaactgagtatttttattttacatttatttaaatatttcttgagcacctactgttcttgaggtactattgttctagacattaatgatcagcaatgaacaaaacagatgaaaattcctgcctccatggagattacattctaatacaataaaatacatatttatatctgtgtattgactcattagttttaagtcattactttttccctctggctataaataagttcctatctcaaattatatccccagtcttccatcctgatagttttttgttattcattcctttgctttttgtagtttttttacttatgtatataaacctaaatggcattttatttttgaaaaactgagtagcatgtaccaaccatgctatataagaacaagtccatatgttcccaatattctagtatccaatatcaagtctatataatggcatgttttactttattctaccagcacttttgataacaccctcttgtttcttatagatgagtgatgtgtctgcaggaggagccactgtttttcctgaagttggagctagtgtttggcccaaaaaagtaagcctgtttgttttgtttttggtttattaattttttccctaaggaagagatgcacttgtattcatggtctaattaatgaattacatttttttttctttttcattttttgagacctgttctcgctctgttgcccaggctggagcccagcagtataaacatggctcactgcagctttgacctcctgggttcaagcctcagcctcccaaatagtggggactacaggtgcatgtcaccatgcccagctaatgtttaaattttttgtagagacagtgtctccctgtattgcccaggctggtcttgaactcttgggctcaagtgatcctcccacctcagcttcccaaaatgttgggattacaggcatgaacccctgtgcctgaccaaattacatttttaaaggtatttttatggtccttgccacgagtacttagaggtaatgaatgaccaggaattagtatttaaaatttttcatttctaaaatgggttctgcattgtgttttcccctccatcttgctatgtaagatatgttagctttcttttggcaaatacttttgttgtcaaacatttttatggtatttttcatatgatcaaaaacggttcttaaagtgatataaccatattttcagaattatattagaggaaaataaaatactgctatagagttcttccgcaggaacaaagggaaaattactgctgaaaacggccgggcacggtggctcacgtctgtaatcccagcactttgggaggccaagatgggcggatcatctgaggttaggagttcgagaccagcctgaccaacatggtgaaagcccgtctctactaaaaatacaaaattagccaggcctggtgttgcacgcctgtaatcccagctatttgagacgctgaggcaggagaatcacttcaacctgggaggtggaggttgcagtgagctgagatcgtgccattgcactccagcctgggcgatagagcargactctgtctcaaaaaaaaaaaaaaagtaataactaccgaaagcaattacctggcattgtatacttggggataattgtgaattgttctccatagggaactgctgttttctggtataatctgtttgccagtggagaaggagattatagtacacggcatgcagcctgtccagtrctagttggcaacaaatggggtaaatatttcatatattctgcgaagataatgtaatttttgtttcttattttggaactattatctgtgtcttaaaaacaaaagcccccatgtttgcttaataygattttaacattgtacaggattcagccaaacaagtgcctaatcataatacaaatttgaaatcagaattttgatgacagattttatttttaactatttttacttattccaagaaacaatgactgactcaaaattgaataagacaatatcttcccctcaaagggttaataatctgattgagacatactaatggattataatgtagtacatattaatacaaaaatgtaaacagaagatggtgactgcctaagtttggggagtcttcttcaaagctttttctttaaatttggtcctgaagatagaacagcagttttccaaacatgttagataccaggttctaatgtgaggctcgagtagcacctaatgtgcaaaatttaaagaggcactcactctcagtcagggacatgcaagtgcaggabcacatttttaaaaagtaaaaagaaacaggtaaaattagttttaatatctattaattagccccatgtatccatttcaatctgtgttactagccacatgttgagtggttacatacaggacattacaaggttaaggagtgaggcctgatcaggattttaaaatctccccttatgattatagtgtttaagaaccactggactagaatgaggagaggctagttggtgagagagagtttagaaagctgttttctgttgtctaagtgggagatgataatggcctggattaaagcatcagtgaaagggttggagagcaaatagatttgagagagatgtaaggaaaattgtcagggtttgatgaataaagtgtagatacaagggttgaagaaggaaaaagagttaagaattaaggttcctgctttagatattttgactgggttctatggtaccagagacaaaaaaaaaatagaaaattaactgcttttgggatacatttttacatggtatacattttttaaaggtattttggaaacttgatgagcatacaatagcaatggttgataagagagttgttcctttagagtgcaaagtttgtgttcattattgtctttgtattttggaggctgtactttgaaaacaatacataaagcaatattctactcttacctgtacctgtatcttaggtccatttgtgtctcatttcaagcctcacattgaacattggaaactgtaagaaatgcacatagactggcaaatatacatgtgtatacatacatgtatgtacatacaygcacacaagtgtgtacacatatgtatataggtatakaaaatctgtgttttcagcatttagccaagtttttaagtagcatctgcctttatccggttttggtgttgaacttttatcccatgatgaaactttgttatagacctagcttttagaaactaattaaatactgattagattaagggggaaaattaatatattacttttctctcacagtatccaataaatggctccatgaacgtggacaagaatttcgaagaccttgtacsttgtcagaattggaatgacaaacaggcttccctttttctcctattgttgtactcttatgtgtctgatatacacatttcctagtcttaactttcaggagtttacaattgactaacactccatgatkgattcagtcatgaacctcatcccatgtttcatctgtggacaattgcttactttgtgggttcttttaaaagtaacacgaaatcatcatattgcataaaaccttaaagttctgttggtatcacagaagacaaggcagagtttaaagtgaggaattttatatttaaagaactttttggttggataaaaacataatttgagcatccagttttagtatttcactacatctcagttggtgggtgttaagctagaatgggctgtgtgataggaaacaaatgccttacagatgtgcctaggtgttctgtttacctagtgtcttactctgttttctggatctgaagactagtaataaactaggacactaactgggttccatgtgattgccctttcatatgatcttctaagttgatttttttcctcccaagtcttttttaaagaaagtatactgtattttaccaaccccctctcttttctyttagctcytctgtggtgaattaaacgtacttgagttaaaatatttcgattttttttttttttttaayggaaagtcctgcataacaacactgggccttcttaactaaaatgctcaccacttagcctgtttttttatcccttttttaaaatgacagatgattttgttcaggaattttgctgtttttcttagtgctaataccttgcctcttattcctgctacagcagggtggtaatattggcattctgattaaatactgtgccttaggagactggaagtttaaaaatgtacaagtcctttcagtgatgagggaattgattttttttaaaagtctttttcttagaaagccaaaatgtttgtttttttaagattctgaaatgtgttgtgacaacaatgacctatttatgatcttaaatcttttttaaaaaaatgtttgttttctgtgtggtgtttttcgtatttaaatccgaatgtatgatgtggcagtaacaggttaacttatgtaatttctttagtacatagggcttaggtttatactcttggtttccactcacactaatgtcacatggttaagaaaaacttaggctctctgaagtttcagatatttcatgaatcaagatgtgcttccttcaaagagagctctaaaatactttactgtggttatgaagttattatgggccaggcatggtggctcacgccttcaatcccagcactttgggaggccgaggcaggcggatcacctgaggctaggagttcgagaccagcctggccaacatggtgaaaccccatccctactaaaattaccaaaattagccgggtgtggtggtgcatgcctgtagtcccagctacttgggaggctgaggcaggaaaatcgcttgaacctgggaggcagaggttgcagtgagctgagattgcaccactgcactctagcttgagtgacagagtgactctgtctcaaaaaagaaaaaaattattacaatagtggtacttaagactttctcctattaagaaatatgatgctctttcctaagtggcctgaggtaatctgaaaatggttcgctattcacttgacccggagaaccccacaaaatcatgcaaatcaagaggttccaatcttcgtgttcactttaagaacactcgtgaaactgctcaggccatcaagggtatgtatatacaaaaaggcacgaagtatctgaaagatgtcactttacagaaacagtgcataccattccgacattacaatggtggagttggcaggtgtgcgcaggcaaagcagtggggctggatcttctaagttgatttttttcctcccaagtcctttttaaagaaagtatactgtattttaccaaccccctcttttctcttagctcttctgtggtgaattaaacctacttgagttaaaatatttcggtttttttttttttttttttttttttttttttaacaaagtcctgcataacaacactgggccttcttaactaaaatgctcaccacttagcctgtttgggccacaaggtcggtggcccaaaaagagtgctgaatttttgctgcacgtgcttaaaaacacagagagtaatgctgaacttaagggtagattctctggtcattgagcatatccaagtgaacaaagcacctaagatgcaccaacggacttacagagctcatggattaacccatacatgagctcttcctgccacattgagatgatctttactgaaaaggaacagattgttcctaaaccagaagaggaggttgcccagaagaaaaagatatcccagaagaaactgaagaaacaaaaacttatggcacgggaataaattcagcattaaaataaatgtaattaaaaggaaaaaaaaagaaatatggtgtggtaatagctgtgagcttaatgaagtaagttaattgatgctttagactatttacattacttatggtgaatcctagttcacacaagagttctttatactttatgcagtatttaaatactgaaggaagaatttggtttgattctctgggaaagtaggtatttttacccacttttaagtgaactctgaagctcctttcttctgactagcctttgttccaatataagtgttttagaaatatggagaattaagttcagcactttgatccactcagattttgtgaccattgatgatttttaaaaaaattttttagtaaagtggatggaagcagaaaattcaaaaatgtagacataatataggggttcaaagaatggaaaatactgtttattgccatgtgtgttatagaaagtagaatacaagtgtctttcagaaggaaattacgtattccataatcttacaaatttcattatattcaacttggaaccccacgtgggaattattaaactctttcagaattagatcatacagaaccctttaaagttttataattaccaatgatttttctttccaaatgaaaagagggaaaaatccaatatgaagcttttagttccattactgcaattctgttatttcttttaatgctgaactttcacataaaggagggctggaactaccctggaaaatgtggaaactgttgtttcctcaccaaccctaagcctttccttccatattggaagtttcatcattcattaactaacttttattcttattaactttaaatagggagttatcaccaacatggagttaacggaagtatccaccagaacatcttaacagtggggtaagcaaatgtgataactagatggtaataacctagtaatattataaaaagagcagtgaactgactttacgattctttggaaagctgaatggtaaatgcagtaataaaagaagcaatcatctacctcagtgaaattataataaaatggttattgggcaggcatggtggctcatgcctgtaatcccagcactttgggaggccgaggcaggtggatcatctgagatcaggagtttgagaccagcctggccaacatgttgaaaccccgtctttactaaaaatacaaaaaattagccaggcatggtggcaggtgcccataatcccagctactcaggaggctgaggtgagagaatcacttgaacctgggaggcagaggttgccgtgagctgagatcgcaccagtgcactccagcctgggcaacagagcaagactccgtctcaaaaaaaaataaaatggttattacagtgtgagagtgtggagaagttacaaatagtaaatcaacacatatatataatttataaactaatatatgtgtgtgtgtatataaatgaaatcttattgctgcttaaaagaatctaagtatctttacgtagccatgtgttgactgctatatgtaacttccataccacttaagtccatataactgaaaaatgaacagcttctatgcagagcccaatggactaaactattgaatgactggattgctgttaagaaatttataggctgggcacagtggtgtatgcctgtaatcccagcacactgggaggccaaggtgggaggatctcttgaacccaggaatttgagacctgcctgagcaacatagcaagaccctatctctgctaaaaataaaaaagttacccaggtgtagtggcatatgcctgtggtcccagctacttgagcaggctgaggtgggaggatcccttgagcctgggggtcaaggctgcagtgagctgtgcttgtgccactgtactcaagcctgggcaacagagcaagaccctgtctcaaaaaaaaaaaaaaaaaaaaactgtgattctaaaacacatacaccaaattatgattaattataaatcacttgaacagacagaattatgaaatgaagattgctgggagaaagcagaatgggaaaaatgacatcttaatccagatggccagcaacacaaggaccaatctcttggcggtggttatttttactatagtaaaagttagtgttttagagggaacaatattgggtaacttagacaaaaaggaatgagttaatagagtaccataaattaccagatttatcagaataaaatttcaaaatcctgtgctcctaatgtccttggatattattcaaccactttaatgatattttgcaaaattaactgtagtagaccagtaaaggtctttggctgcctactttctgaaatttgaggactatgaagtttactttctgtgtaaatgtagccttaagttaaatataaatttctactcaggaaaactgatgagaatgccttactgtaaataacatatacaagcagatgttaagtaaaaggagcaaccaaaaggagtggaagtcctccatcgtctgcttttgaggtcttgttgaactttcattgtagcactgttctgttgaaattagttatgtgttgcttaatgagaggaaaatgcatcatcattagaagattgttgttgtgggaacatcacagagtgtacttacacaaacttagatggtatagtctgctacatacctaggctatatgatacagcctattgctcccaggctacaaacctatacagcatgttattgtactgaatactgtaaccagttataacacaaagctaacaatgtatgtatctaaacatagaaaaaggtacagtatagagtattttaatctacaggaccaccaccagataagcagtctgtcactgactgaaatgttaggtggcacatgactgtagtgttatatacaaagcaggataatcacataagaaataaactctaaaatctgaaaaaggaaaacttctcaaattttgtcagttggtcttttcaattcataataggcttatttctaaaagaaatctgttttaggctaagcacttcaaatttggaatagaacattttaaatatagattgatgtacacttttacatttcagtgctttttagggagaaggattgtgtttcaagttagaaaaggcattcacgtaagtccaacaaagagtcagaattatcataatatctactttaagtatagttgaactccattccaatgtgggttttacccaggttttgatatatcatgagtcatatataaaataactacgtatggttaacttataataaaaatctcatcttttgatacatgcatgataaatcattaagtctgagaagacaaaataacttacataacagttgaatttagttatgttctatttttactttgcttttaaaaagcaaaaaagtgaggttctgttacatgaaacaccttttgacttatgagatagatagaaaaaaagtagtccttactaaaaataatcagtgctatctttcccacgttcttttcttatttctgcaactatggagaaaatagtccatgaaaagttcaagtaaggtaatattaaaagtgctctgaaacagtgctagtcagtgtggcttatagatgagctgccgtggggtttcttgtccacaaaggcatttacatcaaaataaaaataaactacatcagtaagtacctccttcatttaattcagttgactttttgtagcaagtctttctagatgaagaaagcagtgttatttacattatagtataaacttctaatctcagtgtaaaccagaacttttcagtagtgttgctcatttccctcccttgaacgggagggaatagagcagaacttatttccagcattctaactcatctgggggcttcttgaaagagtgtgtttcacttaacagagggctcacatggggaaaggcagcatgtctgggaaaagctgcacaacttgaagctgtcaccccaggctgctcccaaggctcagaacacgcctgctaattagtgaaggaaggttgtcctcatcatgaaaccagtctgcaaaaactgggagagatgatttttttttttaattcccatttttccagcagaaaaccacaaggcaaaaacaggaaaacacccattcaaagggagaaaaggtgacagaaactgtctctgaagaaacacagttattaaatacttagaacacctgtcttaagtatgctgaacaagctaaaagaaaacatggacatagaaccagaagtagtcaggaaaatatatgaacaaaatgagaatatcaacaaagagatagaaaaggagcaaaacgaattctggagctgaaatgtacaatacctgagttgaaaaattcacttcaacatcaggctagaattcagattgttccaacattaagatgtaatcctcataactgcaaagaaaatatgtatagaatatagacaaaaggaaaagggtatcaaaaatacgttactaaaaaaaaaaaarrgggggtagggggagccagtaatgaggccaaaaaaaaaaaaaaaaaaaagctgccaggggcagcagcttacacctgatatcaacactttgggaagctgaggcaggaagattgcttgagaccaggaattcgagactagcctgggcaacatagatgccatcttttcaaaaaaattagccaggcgtggtggtacatgcctagtcatagctagtctggag

SEQ ID NO: 94269 - DNA, 17161 bp, Homo sapiens
tgggaggcagcattagggacatagggcctctgctctccctccaggcctgcagacagggagcccatgcctcccaggcaccctccctcctggctacagtggtgtgcgctttcagccatggggcctgggaaggaaaagtggaacacaagcaaggcaggctgaggttaggccaatcctgcctggagttccccttattctccatattctttgggcactcctgttccacagcaaaagctgagggggttgtgattttagctctcaactggcctttcctttggctcggaatgaaaatggtcagaccatttctacttgacctttttaccatgcataaggtccccaagaggctgtagctttgctcgggtccttctgaggcctgcactgggatcccatttctcctcctctccacttagttctcattcataaaagaggaagcttagcacccaagaatcctccttcctttgtctttaccctgcccaacctacatccagagcccagcctctcagggtcctttcctcctcaggcttagaccaaggctgtaactatttttgcccaaaatagtcctaaggttcccactcaggccttactttatcagccccttcatccttcagagatggcagcattcgttgtgtgccatctccttcccattcctttaaactgggccttcacttcctctaatttttttttttcccttacgagccctcctgcgtccccctccatactagcttcctggcccctttcagagctgatgggttctgcctccttcctccacctccttagctccaggagctggtctgccacgtgatgatgggtaacctggttatgtttcgaaaagactcagttctcaacatactcagtaagtgatcaaatctttaggtgcctgggagaggagaggagggcagggtgtcagtcctgtgtattttacactatcaggaaagctggttctggggctgggaagttaaggggagagaattgtactccaccctggtgcggtctggggcagtatctttctggatctgtcctacctctgtaacatccctgcttggggtgctggtagtcagtggattgggggtgtgtgtgtgtgtgtgtgtgtgtgtgtgtgtgtgtgtgtgctggtagtcagtggatgggggggtggggggtgtgtgtgtgtgtgtgtgttcgtttgttcattcttgagagagatgtttcttttgtctcttccagttcagagcctagactgggagacctttgagcagtattgtgcctggcagctctttctggcccacaatattcccctggagaccataatccccatcctgcagcacctcaaatacaagggtgagtaggcttttgggtagggagcacatcagatatgacacttcctatacagttagggcaaggctgaggcctctaggcttctaggatgagcccagatccattgtcctccttcccaccaaagtgcacaagggcaggctctctgtcagccacttttgttctttaggtgagtcctgtgggcccaccatgagccaggctctgggctggggctcaggtggctcagggactgataggagtggggtaggggattcttcctggctcctcatcaaagactgtccttattccctccagtggctgttgggggatgagagaggtccccagattccatcctggaatcataccttccccctgaacagcctctgcccttccctcacagagcacccagaggccctgtcctgcctactgcttcaactccgaagagaaaagtgagttccacttctggggctcttcagccctcaattttaacatcccaagagctgctgtggtctaaagggcttctgtcctcctccttattgccatattttttcctgtcgttaacatctgcttattctgcccttcccccaacgtgacttacaaatgagcagctcccctgggatctgggcttcctctcgactttacccccctgcccaccaggagctgccctcggaggtggggaggtggggaccggacatccctgtttcctgctgccacagcagttctaatccctggtggctcctgctccccgccgcgccccccccaccgccccatgctcctgctggccaccgcacagctaatccaagaggagggagggtcagggtagaggggtcacgcaccatcctctccctcaccctgtgcagagcagagccagctggacctactgtgccttgacagggtggggcagagagggagagggtggcagccccctcttcccgcaaagccctttagcaacatcccccgataaatggggcagcagctgtgtatcttatccttcctacctttctgccttccttccaccctttctgctctcttgcctgagagactataaatggtacagagtgtcctagaggaagtgggaagcttggaggctgtatggggctgtgacttcacaaccctctcctgcccccttcctccagctggaagccaggttggcccacagctttagcagggtaggggtaggggagcatctgcatgccacatgcttgtgcttctgcctcccaggcccactccctgactgttctaggggaggaggaggagaactgagggtcctccttcccaacacacacacgcacacgccttctcctaccacagcaagtgaagaatctcacttcttctctcctggcttccacagaggatgaaaccaggcattccttggcctaaggagaagagggagagggatgtgagagtagtgggtgggtggggaggccagggcttgggaaataagtgggagagacccagcatgccctgcggccactgtgcaagcagcacccagtgcccccttcctcccccaggcccagcgaggagatggtgaagatggtgctgagccggccctgccatcctgacgaccagttcaccaccagcatcctgcggcactggtgcatgaaacatgacgagctgctggccgagcacatcaagtccctgctcatcaagaacaacagcctgcctcgcaagagacagaggtgggacacggtccctgtctaccctccaggccatggcggtctgcagtgattgctgtcggtggtggtggtggtggtggtggtggtggtgatgggggtcagtgctgtcccagcctggtttgtgggcgacatctagtggtccgaagccacatggcatgcgagaccaccgtggccctttctccccatcttccagtgcccctgtggccaggatcccctgttctaggcacacctttctcacccaaccccagccctcccaggctgcctatcctgttccccatgtaggctgcctctgtcttaagggggccctggcgggtggagggtgtctcgcactctggaaccctcccacactcagactctggctctggtgattcctgcacagcctgaggagctctagcagcaagctggcccagctgactctggagcagatcctggagcacttggacaatctgcggctcaacctgaccaacaccaagcagaactgtatgccttccaccctcggcgtccagtgtagacggtgctgccctggcccagactatgcctggagccaggctgggggcaggggcaggacacccggggccacaacccacactcgggataaaacaacctgtgcgtgctgtttaataagctcccagacatctgattgtttttccttccctgctctcccttttcttcctctagtttttagccagacsccaattctccaggcgctgcagcatgtccaagcgagctgtgacgaagcccacaagatgaagtgaggctcctgccactttgggccttggaaagtagtaggggaaaagcctaagggagaggaagcctgctagggacataaacgtaatggccagcaagaccttagggtccagggttgaagaaaaagaaggcctaggcctgggggcagagaagaggatgggaggtgccgtaggagcagcaggctcccactcaaagagctaccgctccttttccttagattcagtgatctcttctccctggcggaggaatatgaggactcttccaccaagccacccaagagccggcgaaaagcagctctgtccagccctcgaagtcgaaagaatgccacacagccccccaatgccgaagaagagtcgggctccagcagtgcttcagtgagaacccagccagtgcacagggggaaaaggagcactgggtgcaggtggagtcggcgccagcagctgcccaggctgttaacttcccatttcccctcccatctcttccaggaagaggaagacacgaaaccgaagcctaccaagcggaaacgaaaagggtcctctgcagtgggctctgacagtgactgaggccctgcattccccatcccacccccggctggactgccctctccttcttggtgattcaaaggttaatagaggctgaggagattgcaggggaaacacccttgctgcatccccaagctcccccggtggaaggaggagctttctcctctggctgagtttgagaagctgccatgcagcccctagccccttccctcctcctggggcctccagcccctcacactgctgttcccagtgatatttgggatctgactgaagccagaggctctgtaaaatcagaccatagtggaagtcctcagccccctggccccttccgcaatctcctcccccagtctcccaaagagccatttcaacagagaagggaaatgacaaaggggcagctggccagataagctaggatgagagcagagactcagtgtgtgggtgtcccttcctgcttccccttcaggtcttggtttgttctgaagggacgttttatagtcactatccacatgccagtgtgaaatgggcatctatgacgtggtcagggtgtccattcctaatcatggggcagatgccacaagcattcagaaaggagtctgaaagggtggccacagccccacgtggtgtgccctggaggcttaggttggtctgaggttggcacctcaatctacaccagagcccagggagtcccagaggcaagtttcacagaattgtcaaatgatcccatttccttgagtctgtttttttttttgtttttttttgttttttttttggcagagataatcgtgtcttaaaagttgtttttaaatgacaataaaacaagccagaatgtcttttgtgctggagtgtctgctggcatttgccccgtgcatgtatagcttggtcttgatttgattggcacccctacttgtaaccgcagaacatccccctttcccttcctgttctgcccccacttttgtctagagcagaagggacttggctttggccactacccatccttcctgctgccactggaggtgggagccaggcactgatctgtctatgcagaaccatcccccgtaggatgaggcctgtccttactcatttctcaagaaacaagatgcttccaaaaggtctgtcatcctccagttgaagtctgtgtgcctaccaagaatggccggaggactcgctgcttgacgggagggatgctccagcttggtctccagggacaactgtacctggagataaagtctggataccagggagggacagagatgctcttccttccacagtgtggccacttgctgggccatgtgaaccagcagaggagagttccttggctatgctgttgttcccccgctgtccagggagaatggaggtggactgaggagtgaagtttgggcgaactgcacagagctgctcctcttcaccccgaaaatttgtctttttacagaatccaggttctcccctccctcatcactgctgttgcttcctttgaaagtctaaaccactggaggcttctttttccttcctctctccttccccagtttcctctgtcccaattaaaaccaggatggagagcatttgctggctggccccaattattgtacccttgcccaaagggaggggcctctgtcgtgacccctcagaaatctggcagtctgggtttccacctttcccctatttaactctcagcccccacccatcccctggggttgcggctggcaggccgggacttgcagaaccaaatgggccaggggccaagttcattcttttgggagagagcmatggtaccttcccttaacgggaaaacgagaaatattgaggggaagatggactgcgatccaaacgccctggctctcaggcctggactctagggcttagccagatgcctaaaccgcccaagccgagaaacaacttagaagacagacataaccctgggattcagggaaggcgcgagcaccgcccaggacctggtagggtgcgagccgcgagcagtccgggagggagcgcgcctagggcggagcgtaggctgtggggggagggctgggagtccggggccgccccacacccgcactcctcccgggtttctgctctccgcccgtgtggagtggtgggggcctgggtgggaatgggcgtgtgccagcgcacgcgcgctccctggaaggagaagtctcagctagaacgagcggccctaggttttcggaagggaggatcagggatgtttgcgagcggctggaaccagacggtgccgatagaggaagcgggctccatggctgccctcctgctgctgcccctgctgctgttgctaccgctgctgctgctgaagctacacctctggccgcagttgcgctggcttccggcggacttggcctttgcggtgcgagctctgtgctgcaaaagggctcttcgagctcgcgccctggccgcggctgccgccgacccggaaggtcccgaggsgggctgcagcctggcctggcgcctcgcggaactggcccagcagcgcgccgcgcacacytttctcattcacggctcgcggcgctttagctactcagaggcggagcgcgagagtaacagggctgcacgcgccttcctacgtgcgctaggctgggactggggacccgacggcggcgacagcggcgaggggagcgctggagaaggcgagcgggcagcgccgggagccggagatgcagcggccggaagcggcgcggagtttgccggaggggacggtgccgccagaggtggaggagccgccgcccctctgtcacctggagcaactgtggcgctgctcctccccgctggcccagagtttctgtggctctggttcgggctggccaaggccggcctgcgcactgcctttgtgcccaccgccctgcgccggggccccctgctgcactgcctccgcagctgcggcgcgcgcgcgctggtgctggcgccaggtaaggctggagctccgaactgactaaggcggggccagccacagaagggggcgtgtcggagaccacagaaaggcttggtctcatccctgggcctgggaagaagccgactatcccttggggttcgaaagtgggtggagataggagtctccgggtttgagaagggatgaggctgaatctttggtgccccaaggatccccaaggagtcgagttccaggcctcagacccaagatggaatgtccatacccttcaccctcatccaagagcagtgtgggctgggatagggaggggacatgggtcataggctcttctaggtagagccagggccccggcgttgtgctttcccacccttctagagtttctggagtccctggagccggacctgcccgccctgagagccatggggctccacctgtgggctgcasgcccaggaacccaccctgctggaattagcgatttgctggctgaagtgtccgctgaagtggatgggccagtgccaggatacctctcttccccccagagcataacagacacgtgcctgtacatcttcacctctggcaccacgggtgagggccgggcaccatacttagctccccgaaaccaaggcagaggaaggcaggggtctgctcccagaccactccttcaaagcccccagagaggatgctgatttcattggcacatcctttttctccccatcatttcactccccagtctcctcacctcctactcatttctccacctcccccagaccacccatatttccaggacagcctggtctcggtcctcagcttctgtcctgcctccgcctctttctgtgggaaacccagcgggggtgcaaacagataggtagagcttggagtttgcccttcccctgatcgtcccataactgccaccccacaggcctccccaaggctgctcggatcagtcatctgaagatcctgcaatgccagggcttctatcagctgtgtggtgtccaccaggaagatgtgatctacctcgccctcccactctaccacatgtccggttccctgctgggcatcgtgggctgcatgggcattggtcagtctccccaaccccaccttcattaattcatccagtagacatttattaagcacgtactatggtgtgagtcctccagggtagataatctagaggacggatggggcagagccctactcaccaggagctctgtacaatagggcaatgtcacctgcctagacctacagactgaggaacggtgaggggggccatacagccacataactccaggctgcagggtcaaaggcagggaaggactgtgtcagtccaggaacaggcaagtaagagaagagggagagagagacaaggaagtgagagtgtggaggatgagatctttggggctgggaagtagggaaagggcattcacctcttctaaggctggggacaggggccgggggaggggaaagagggccagcacggcttcctgacggtgtgactcccacagtgggcccttcccagggaaagactacagtgatggctggggtctggaaagaggggcttgggctccccactcygctcctaatcttacctcycttcttcccccctgcccacttctggcaggggccacagtggtgctgaaatccaagttctcggctggtcagttctgggaagattgccagcagcacagggtgacggtgttccagtacattggggagctgtgccgataccttgtcaaccagcccccggtgcgtgggcacagatcctgggcagagctgctgacacagggctagctcacggggagcaggacagttgacaggagacagggagttggagggagaagcagcaagaagaaaatggcagtgtaagataaggagccagagatggcctaggccatctgatgcttacrgcctctgaaggaggtcacagtaggagggggttctggggaatggggaacaggaattcacttccgggagcgggcatcttgatgctgaagctccggcccctctcccactcatctcagagcaaggcagaacrtggccataaggtccggctggcagtgggcagcgggctgcgcccagatacctgggagcgttttgtgcggcgcttcgggcccctgcaggtsctggagacatatggactgacagagggcaacgtggccaccatcaactacacaggacagcggggcgctgtggggcgtgcttcctggctttacaaggtgaggggcagagaggaaactgaaaacccgtggaacagcagagggctggcaggagagggggctcatgtgactgcaatgatccagtacccaggtctccctttccccagcatatcttccccttctccttgattcgctatgatgtcaccacaggagagccaattcgggacccccaggggcactgtatggccacatctccaggttggtggtgttctggtggggtgggcggggtgctgaagctggcacaggaggactggaattggagactggggtggatgggggcagaaggctctgggaaaggtgacaccactcctgaccctggtgactctgccaggtgagccagggctgctggtggccccggtaagccagcartccccattcctgggctatgctggcgggccagagctggcccaggggaagttgctaaaggatgtcttccggcctggggatgttttcttcaacactggggacctgctggtctgcgatgaccaaggttttctccgcttccatgatcgtactggagacaccttcaggtatctgtccataactggtttttcatcctggacatctgatctctgtgatccaaagcttctgaacctcaactctctaatctgccacctcaacctgggtcctaagctaatctctcattctcagatctcaccatttcatccctgtgacactgacctctgacctcatctccccaccaagcccataaggccctgacccctgactcccagtttcagatctctgytctctgacaggtggaagggggagaatgtggccacaaccgaggtggcagaggtcttcgaggccctagattttcttcaggaggtgaacgtctatggagtcactgtgccaggtgcctaggcatggaaggtgggggaggcacccagccaccaccccgaattggtagtacttgggcgcagggagcacgaggccttcgtggtggtcagccatggaggggcttactctgtctcccacacccaccagggcatgaaggcagggctggaatggcagccctagttctgcgtcccccccacgctttggaccttatgcagctctacacccacgtgtctgagaacttgccaccttatgcccggccccgattcctcaggctccaggtaaccggccacttcccccgccggcccctcaccccatatatcctcaccccacatatccaccccgtgtatcaacttaggagtttgatggctcccaaactccacaaagggacccccaacgtaatacactccgtgaagagaaaaaacacggagacacaagctcttcaccccacttctttccttatccctgccttcttctggcctggctctttctcctccctgtcacctcctcccctaaaccttgacctcacactccctttcccaagacttgctccttaacaaaattcaggcaactcccctgaaccacgtgggcagagtccccttccctccaaatccctgaccctcctgtccccaggagtctttggccaccacagagaccttcaaacagcagaaagttcggatggcaaatgagggcttcgaccccagcaccctgtytgacccactgtacgttytggaccaggctgtaggtgcctacctgcccctcacaactgcccggtacagcrccctcctggcaggaaaccttcgaatctgagaacttccacacctgaggcacctgaragaggaactctgtggggtgggggccgttgcaggtgtactgggctgtcagggatcttttctataccagaactgcggtcactattttgtaataaatgtggctggagctgatccagctgtctctgacctacagtatctgtcattatctctctgtggaactgctttttccttgagagttttctcctggcgtggagccacaggccccacattcctgccctgactggctgtgggccagagccccgtatctggaccttggtgttttcctctcaggagaccctgtgtgaccttcgtccttggagaacctctggtgactgatgtttgtctgtgctcctgtgtagctcgccccagttttactctccgagtgccaggctcccactgctctgtcttgggaactggaggacccgaggggtcggctcaaagggcagaggtggacagaagcacacagaaatgccacctccggcagccagcccaaactgctcccccagaatcaggtgtggccgggcctggggaagagtcttaaccagcccaaacaagtgtttgactgtgggggaaaggatgctcaagatatccctctgcctcgcagctgtctctgagaagccaatctttgagggggaagagtggggtgcccctgcctccagatgttcctactcctacctggtgactgtcagacattcccagaaggagcagtccccaggggggaccctccggtactgcaggagagtttgacggaagcccctccatggagtgaggctcagagtgcatgtggtggcaggagggatggtgggaatcaaaaggacaaaggcctctcgatccccaaatgaggtgtccagaaagttcatcatctaaaagcttgaaatgatgaagctcctgcttctcctaggaactacagtccccctctgttttgagctgtgggtccttgaaattttatgctactttgcctttccccttctagcccctctccccaacatgagaggtcaggggacatgccctactggcacacttgggtctctattgcgggccctcctgttccaaaactttacaacttgcccccttccaccagcaagcccggtgcagcctcactgacagactaggtaaggcacacgctaaggtgcaggggaaaacttcatgcgtagaccaataaatgtggaacttaactcattctgtgcacctctccaatctgccccaggaggagtacaatagtttgggtgtgcctgggggtagggcgggtaggcagcctgtgttggctggcagtggggcacctcctgcagctgctctcccacaccttaactcagcccagatttcccagacctgcgagctgagtggccacctcccccatcgcagaacctcacagcaagctttttttttttctggagacggagtctcgccctgtagcccaggctggagtgcaatggtgcaatctcggctcactgcaacctctacctcccaggttcaagcaattctcctgcctcagcctcccgagtagctgggattgcaggcacacgccaccacatccggctaatttttttttctatctttagtagagaccgggtttcaccatgttggccaggctggtctcgaactcctgacctcgtgatctgcccgcctcagcctctcaaagtactgggattacaggtgcccggcctatttttgctttttaaagtgtagctactagaatatttagaattacatgtggctcaggttatatttcttttttttttttttttttttttttttttggagatggagtctcgctgtgtcgcccaggctggagtgcagtggtgcgatctctgctcactgcaagctccacctcccgggttcacgccattctcctgcctcagcctcccgagtagctgggactacaggcgcccgccacaacgcccggctaattttttgtatttttagtatagacggggtttcatcgtgttagccaggatggtctcaatctcctgacctcgttatcttcccgcctcggcttcccaaagtgctgggattacaggcgtgagccaccgcgcccggccggctcaggttatatttctactgaatagtgctggcctaaatcctgaccccacacttcactctgcaaacccacaaatgccaagtgtaacatgtcagttgcacctgtgccacccctctcttgagtatctgcactttagcaaggtaagctgggaggaggggaattctggtaaagtgggctgagccagtcgctgggacgctgggacagcattctgtcttctactcctatgttgggctcacggctcggctctttgaaccagctttgtcacagaggctgtaattagtgatagaaatggaaagctgcaagaaggccaacttttgattcaaaagcatcaggttttctgtttgctataataaaaataaaataaattttaaaagaattaggtttgacaccagcctgggcaacatggccaggcatggtagtgcgcatctgcaatcccagctaccagggcagaggggtgatgctgaggtgggaagatcccttgagtctgggaggtcggggctgcagtgagcagtgatggtgctaactgcactacagcctgggcgacagagtgagaccctgtctcaaaagaaaaaaaaaattaggttgccccacaaaaagttaattgaaataaaattaaatgagatcatgagatagtttgcaaagatgaaccaggggccaggcgcggtggctcacgtctgtaattccagcactttgggaggctgaggtgggaggatcacttgagcccaggagttcaagaccagcctgggcaacatggcgaaaccccatctctacaaaaaacaaaaattagccgggcgtggtggtgcacacctgtagtcccagctacttgggaggctgaggtgggaggatcgcttgtgcccaggaggccgagattgcaccactgcaatccagcctaggcaacagagtgagaccctgtctcaaaaacaaaaacaaaaacaaaaaaaaacagatgaactagggtggtcctcaggtggtgagtgccctttctcatcaggttggatagaggaggatgatggatgcagagaacctagtccacaaatcgtagcaatactctcagcctcgttgtgtctgcggaaccttccctgggggtaaaggggcccccttcccaaacctgcctcaaaggcaggagtcagcaaactatgctgcctgtttttgttacatacagcacactaaaaaatggtttttatatttttaggtggttgaaaaaaaaaagactatttcataacatgtaaaaattacacgggttcaaatttcagtgtccataaatagttctgctggcacacagccgcgctcgttcgttatgattgtctatgtccgctctcctgccacaacagcagggccgagtgtttatgagacccgatggcctgcaaagcagaaactacttctcgtgcggccctggactgaaagagtttgccgacgcctctatctgccccatccctcctgcgccgctgggctgcggctgcttccgtgagccccgggaaggggaggggaagtggaaggaagcccgcgagctgcgaggcacccggggcggccgcgcgcgaacccacaagcggggagatggcttggcagggagagtcgggaggcacccctcgcccggagacccccgtggggcttggcaaaaaaaaaaaaacccatctcgggcgctgctgggggcggaaaggcgtcaggcgcatggasccaacatactccctggcagcctccgcccggcgggcccctgcagggcggtgcttcgcgcctacgtaaacccgacctcgctgcgcaagcgcaaatcggtgcccgcccggcgcgcgagaggggcggggcaggctggggaggcgggcggagccattcttatggtggtacagaagctcctgacttccagccaaaaagacaaacggaggggcgaggccggagtacctggagttttcctcccagagcctctttaaaactcacccgtttaaagtgtaaaatttagtgtttttggtatattcgcaaagttgtgcatccatggccaccacctaatttagaacatttttgtcacctcacaaggaaatccctactcattagcagtcactgtccactcacccctcaccctaggccctggcaaccactaatcctagacatttcatgtaagtggaagtatagaatatgttctttttttttttttttgagacggaatctcactctgtcgcccaggctggagtgcagtggcctgatctcggtttactacaacctccgcctcctgggttcaagcgattctcctgcctcaggctcccgagtagctgggactacaggcacatgccaccatgcctggctaattttttgtatttttagtagagacggggtttcacttgttagccaggatggtctcaacctcctgacctcgtcatccgcccgcctcggcctcccaaagtgctgggattacaggcgtgagccaccgcgcccggccatatgttccctttttgtaaccgggcaccttaactttaaaatgcatttaaaattttttttctacctcctgggttcaagtgatcctcccacctcagcctccccagtagcagggaccaaagatgggcaccaccacacccggctaatttttgtattttttgtacagatggggtttcaccatgttgcccaggctggtctcaaactcctggacttgagtgatccgccaacttctcagccttccaaagtgctgggattaaggtgtgagcaaccgcgcctggccttgaactttttttttttttttttttttttgagacaagagtctcgctcttgtcacccaggatggagtgcaatggcacgatctcggctcactgcaacctctgccccctgggttcaaacagttatcctccctcagcctcccaagtagctgggattacaggcacccgctaccacgcccggctaatttttatatttttagtaaagatgggtttcaccattttggccaggctggtcttgaactcctgacctcaggtgatctacctgccttgttggtctcccaaagtggtgggattacaggcgtgagccaccgcgcccggccttttttttttaagttaatttattattattattattattttttttttttgagacagagtttcactcttgttgcccagactggagtgcaatggtacgatctcagctcacagcaacctctgcctcccgcattcaagcgattcttctgcctcagcctcctgtaaacttttttttttctcttgggttttaaggtataatcttgaggagaactgcagaagccttctgtcttagccttaaaatagactccgcatccctccctttcctacagtatatattcccttcacatttatctaactatatgctagtgtctaattatgtgccttcttagaggttccaggggctaatcttgagatagatgaaccaagtctggagacccagctgcaaaattccagagattacttcaaggttgctagttaacaacccagccattgttgagatgacaccagcctgagatccaggtggactgggacccgagctagccaccagaacaagacacagctcaattcttgcatgccttatcaatttttttttcttttttctttctttctttttttttttaatccctgccttccccgcaaaaatcaaagtggttgctttggatgggaatccggccacttcccctttactagttttggttaataaaatcattttctttaaaaaaaatttttttttaagactagtcaaatgaagcagtgggagtggagaaggaacaaagaaatctgtaactggttgtgatcaatgagttgtaaacaccactgcactcagaccagcctaaaatcactttctttctaccagaccttcctcttgtttattggactctgcaagcagcaagcatccagagccatattcagttgcattttgtgtctgtcttctttcacttagcagaatgttttctttttctttcttttttttttttttttttaagacagggtctcactctgtcacccaggctggagtgcagtgacacaatatcagctcactgcaacctgcgcctcccaggttcaagcaatccttccacctcagcctccccagtagctgccaccatgcccagctaattttctttttaattttttgtagagatggaggttcgccatgttgttcagg

SEQ ID NO: 94270 - DNA, 241809 bp, Homo sapiens
  misc_feature (1)...(241809): n = A,T,C or G
catgtgccactatgcttgactaattttgtttattttttgtagaggtgaggtctcactgtgttgcccaggctggtctcaaactcctgggctcaagtgatccttccaccttggcctcccaaagtgctgggattacaggcatgagtgagccactgtgcctggccccaagctaatattaattgaagataaactgagaagttatagactgtttttttaaatcagctttgatagacttcttagttataagcatcaattgtttatatatcaaatattttattaacttacagaaattaatcgactttttagagcagtttcaggcttacagaaaagtagaaaggacagttccaatatatgccctctcccctcacttacatgttttctcctattattaacattttgcattattgtggtacactagttacaattgataagccaatattgatgcactattattaactaaagtcaatagtttacagtagggttcactcttgaacattccatgggttttgataaatgtataatgatatgtagctaccattacagtatcatacagaatagttttcactgccctaaaaatcccctgtgctctacctattcattcttccctccctcccccagaacccctggcaagctattcttctaattccaggaaatcatttactgctaatgtcaagtaaactcagtttactttggagacctaaacttgctttaacttaactaatttatagttcttttatatatacaatccattttattccttaaagtattatttgttactatgtcagtcaggatctagttaaggaaaaagagaatggggtgtagtggctcatgcctgtaaccccagcattttgggaggccgaggtgggcggatcatgaggctaggagatggagaccatcctagccaacatggtgaaaccacatctctactaaaaatacgaaaattagctgggcttggtggcacgtgcctgtaatcccagtacttggtaggctgaggcaggagaatcacttgaaccagggagtcagaggttgcagtgagctgggatcacaccactgcactccagcctggcaacagaatgagactccgtctcaaaaaacaaaaacaaaaacaaaacagagaatccaggaaattggttacacaaattatggaagagctaaaaagccaaaaaggaaagattcacttctctaagtcctaaaagattagaaagctgaaagcttctaccatccctaggctaaaggacaaatgggggaagatgttgttctggagctgaggggatagggtcactggcaaaagctagagaatcccagtgaacatattcatggggaggaaagctacaaaggaaatgcatcaggcctcaggactgagctagggaacagggcttttcttctttcctcccttcttccaatttcttgtcagtgcctaccactggacaaatcccaggtgaaagtcagctgtcacagtagcctagtgaatacagcctgaaagggtcagccctcctacaatacagagcagggcaaaggaggagaaagaataggtatgagggcaaaatggacaaggactgacacagtaatcaattctttttaactttaaaaatcaactttattgaggtgtaatttatatacaatttatatacaatttatatacaatttatatacttattttaaatgcagacttggataattttttttttgagatggattctgctatgttgcccaggctggagtgcagtggctattcacaggtgcaatcatattacactgtagccttgaactcctaggctcaaacgatcctcttgcctcagcctccagagtagctgggactataagcacatgccaccctgcctggcaataatttttggcaaatgagtacacccatatgaccaatcagtcaagatacagaacattttaatcacttcacaaagttcctgcttactcctttgctacaaatctcccaccccatcccagtcccaggccaccaggaatctgctttctctcactatataggttaattttgcctgtttgggaattttatacaaatggaaatatattatgtactcttttgtgcctggatttttttttttggctcagtatatttttgaaattcatccatgttgtgtttatcagcagttcatttatttttattgctgagtagtattccattgtatgaatacactactttatctgttcatttgttgatggacatctgggttgcttccaggtttgagctgttatgaatgaaacttatgtgaacagttatgtacaagtttttttgtgtttggggtgtgtgcaagtgcatgtgtgtttggtggacatgttttatttctcatgaataaaatacctgggagaggaattgctgggtcatgtaagaaactgccaaactcaacaattctttttaaccttataaatgtcattactatgaatgtccacaaaaggacattgtacatttcctccaaagagcaaagggttagagggagaataatttttatgagaaaaactttaaaaatttgataccttaaaaatacgttaaacttttcataacaatattttttttcctttttattttttatttatttattttttttctgagacggagtcttgctccgtcacccagactggagtgcagtggcgcgatcttggctcactgcaagctccgcctcccgggttcacgccattctcctgcctcagcctcccaagtagctgggactacaggcgcccgccaccacgcccggctaattttttgtatttttagtagagatggggtttctccgtgttagccaggatggtctcgatctcctgacctcgtgatccgcccgcctcggcctcccaaagtgctgggattacaggcatgagccaccgcgcctggcctcctttttaaaaaatatattttagggacagggtttttctttgttgcccaggctggtcttgaactcttgagttcaagctatcacagcctcacaaagtgctgggattacaggcgtgagccaccatgcccagccctcaatattttttaatagatagtatgcaaggggattagaaaagtgtaataagaaaggagttgaaaaagagagcaaactaatgcaaaataattactaaagacttcttgacaatggcaaaatcatcctacacagctgctctgagatctcagcacttgctgtcagctaccttctggcaaagctactttgtcaaatggatgcaataggatccatattgatctttgtgaaggaatatctttattaatataagcaaacacgcctctcacttatagtaatgtaraggtgtgggctttttcttttagtagtattgtttccccaacatatatcactttcctttgaaatgtgggctgagtcataaattaatgtcacaaatgagggaggcaactatgttacaaagtaggaaggcgtagatatgaattgttacagttgacagctaagtactcttgaactaaatgtcattatgtcaaattctgagatattaaacaattgttgaaatgtaaaattgtggacatttaggtttgcagcctaaaaagttttgtcaatcttttctagacattctgaaatggaaatgaacaggtggattgaaaacaaagacaaatgaggagtttaaagactttcttggcacctcatagagaagttgctctacgctggttatgttttaaacaaaacacatataaatacattcagcatttctggaaacagatttattagatctttccatttacctttgggaaaaaaatatagaggactcaaggcaattattcactatattmtttctatcatgtattatttaatctcaagctaggagaggaactctgttttacatgatgccataatgtacattagtgagctcaacccacttaatcttaaaataacagtatcaggtcagggatttagaatacagtattatatgaaaacagttggcagagagactccctcttctgccattaataactggaaacgatatttcagaccctaaatccaactgaaacccagaaacaatacatggagaggatggggtggataatttgtgagaacatgtttttcaaagtagagaaagaatcactatgtttttgctgaattatatgttgccatggacatggcagtttgcagtaatgatgctatcatctatacagctgtataacaacacagcttctttctctcccactccttcagtaaggcttaaaaataataggtttgtgtgtagtttggtaagaaaattagaatcacttaaagtcatttcaattccaacccaagaaagaaaaaaagagacttggggggatggggaagaagagcaaacaaaatgtagaaaaaatacatattattggccgggcacggtggctcacgcctgtaatcccagcactttgggaggccaaggtaggcggatcatctgacatcaggagttcgagaccaacctgaccaacatggtgaaaccctgtctctactaaaaagacaaaaaaattagccgggcgtggtggcacatgcctgtaatcccagctactcaggagggtgagacaggagaatcgcttgaacccaggaggcagaggttgcagtgagccgagatcctgccattgcactacagcctgggcaacaagagcaaaactccgtctcaaaaaaaaaaaaaaaaaaaaagaaagagaaaagaaaaaatacatattatataatgaagcataatatgcattatgcagagactaaagaggggagtcttggttgcctgaaaactaatgggtaaaatccattgaagtgggtgaatccagtgaaaagacctggattgagtccttgttgcatcccttgcatgtgaccttgagcaaagtcaccatgtctttaaggctgttttctcacctataaaatggaataattggccggcgtggtgggtcacacctgtaatcccagcactttgggaggctgaggcaggcagatcacctgaggtcaggagtttgagaccagcctggccaatatggtgaaaccccgtctctactaaaaatacaaaagttagccgggggtggtggcaggcccctgtaatcccagctacttgggaggctgacgcaggagaatcacttgaacccgagaggcggaggttgcagtgagctgagatcgcgccactgcactccagcctgggtgacaagagcgagattgtctcaaaaaaaaaaaaatcataacggtaacgtcctatacctcaagggactgtggtaagaattaaaagggtgaaatcaatgtgtaaactatgaagcccaatagaaataaggtgttatacagacaattgcactattgaatctccggagacagagttgagttaaggaaaaatgcactttcggaaagctttggcgactgaacgacctgagttctccaacgccaaggctggaagtttggagaccttgaaacaagtaaattaccattaatatcataattttcagtttccttttaagaaatgagagtaacaccactttcttcacagaatcaagtgagagagaacctatgcaaaggaacttatcacttggtaggtatttgaagctccctctgcctgaaaactacttattcaaagactgcaacaaaaggtgttcacagtgtggtatctttcaaaacatacgctaaggcaaggaacagataaggaaatggaagtacatccaattgggatccaagcaacccaagtgggaaccaacagctagacttggagatgtcttagctcactcttaaccacgtgagggtagggtatccaaccaataaagacattcagagttggagagcgggcgagtggagtgtcctttagactccgcggactcgacgggagggaccctgcaatgcttaattagaaccggttgccatggcgacagtctctaggcagcgtgggctgagctctccgtaggaataaagggtgggccgccgctggaccctgcgcgcgcccgccaccaactttccctccagatccgagaggggcggcgcgctccgcccccgggccgcgcacgtcggtgctcggcggcgcgcacgcctgcgggagccctctccaggcaacctagtgctgatcgctcgtgccggtgcggccgttaaccgcccttgccggagccctaggctcaaaagcagccccttacccttcctgggcttcccccaacccctttcccggtctgccctggggcatgagcagcgatggccggctgcatccctgaggagaaaacttaccggcgcttcctggagctattcctgggcgagtttcgcggaccgtgcggcggcggcgagccggagccggaacccgaacccgaacccgaacccgaacccgaacccgagyccgagyccgagcccgaaccygaactggtagaagctgaggcggccgaggcttcggtagaggaacccggggaggaggcggccacggtagccgcgacggaggagggggaccaggagcaagacccggagcccgaggaggaggcggcggttgagggtgaggaggaggaggagggcgcggcgacggcggcggcagccccggggcactcggccgtgccgccgccgccgccccagctgccgcctttgcccccgctcccgcgaccgctgtcagagcgcatcacccgcgaggaggtggagggcgaaagcctggacctgtgcctgcagcagctctacaaatagttaagtagctgggcttggctggtggtgggcccgcggtccccaccgcgccggcctcggacgcggctccctcggcccctcaaactgctctcttttctgctcctctcccccgcacccgcgcctgccgccgctgaaagcgcccccgctgctcggacccgggcggtcggctgagagctgcccacgcccgcctcggcccccacgcstcggcccctcctacccggccttgaagccgctctcctgagccccggcgccctcccgccgggcccgggcccctcatcccctttcacctcggcccccagcttctagctccacttcacgcaacctttccctttcctgcctggaaaggtccttcctcccaggcttgagctccctcttcttcccagatcccttctttctcckggaggtttcctcccaccccagtctgtcttttcccgggctgagtgccttgttgtttggcggcagagacgcgactcctttctagactgagctgcgaggtgcctcctgcgtaactgcaacaatgatggttataccggccccgtatccagatgagagaatggagtagattttccgtcaggtgctcagtgttgaaagtgaagggctttttagatgttttcacacagggaagcctagtctcttagtttagacatttgacattccataattgagggaagtgggaaggaattgagagggaagggtaagcaaaattttgcaagcaagccttcgggtgaaagagccataattcattaaagtggaaaagtcaggctgttttgattaaattgcaattaggtgcagtattttcagtccattaagtagatgggatggggtggggagaaagcagatggcttagctacacagatgaaagtctaaaatagaaaggtcmaggctttgcctttcatcccagttctggtttttataggcctgaaatagaaacggtttacaattgcgtttctcaatggaattgttccgaaataatgacagaggagaatactagtaagtctctgaaaacattggtaaacctgggaagtcttttgccattcagctgatagttgtaatgaaaggtgttactctggccacccaaaaagtttactactgcaagattcgctgtaattaagttcaaactcacttttgggattttctcaaaagcctaaagaaaagaagggcctggaaagtaaacctgttttgtcttcatccaagctaatagacacctgatcagatcattctcctgttaaagcagcagtttatcaataggggaaaatcatttaacaaatcttccatagaagtggactgtgttggtatttcataatataagctatctaaaatttaattttaaaatactgttcaattacagtattaccgtcaattagcaaggtaatgatgctttttgagaaacgtaaaatataaaatggcgtgtaataccaccacccagagataaacagtattaacattttagagtatatctggtctttgtgaactatcatagacaagggcttctgagatgtaattttttacagtatttaaagataaagctccctgcttaaaataaaatggaaatgtttattaagggaatttatcttagcagcagactggctctatcttgacagttaattcttacctttacaaatgcagtttgcagaattaaaccaattcaaactttagaaagtgtccaaataaggtcattattttagtacaaccctgaacatttgccatgtaagaaggttttttttttttaacttatttaaagatgatggcaagaagatgtgtgttttttcatatagaagcggccaggagcggtagctcactcccgtaatcccagctctttgggaggccggggtggcagatcatgaggtcaggagttcgagaccagcctgaccaacgtggtgaaactgcgtctctactaaaaatacaaaaattagctgggcgtggtgtcgcgcgcctgtaatcccagatactcaggaggctgaggcaggagaatcgcttgaacccgagaggcagaggttgcagtgagctgagattgtgccagtgcactccagcctgggtgacagagcaagactccgtctcaaaaaaaaaaaaaaagattaattttgatataggtataaactagaaaaaactgaaatgataaaatggccatctagttgagaacagaagtttggatttgaaataaaactagcaaaattaaagttggaaaatatttccgcttaaatcagagatttcatcatttatattgtgttttgtacagaagttgttaatgtatttttattcagatataaaatggctggcttgttcatgtaaagtatctttaaggtccttaacaggtttaaaaacagtttttgccgggcacagtggctcatgcctgtaatcctagcagtttgggaggctgaggtgggcggaacacctgtttgagaccatcttgtccaacatggcaaaaccccgtctctactaaaaacacaataattagccgggcatggtggtgcatgcctgtaatcccagctactcaaaaggctgagccacaagaatcgcttgaacccaggaggcggaggttgcagtgagccaagatcctactgctgtccattccagcctgggtgacagaacaagaccttgtccgcccaccttccactcccccaccaaaataaaacaaaaaataaaaacacacttagctgggcatggtggtgtgaacctgtagtcccagctacttgggaggctgaagtgggaggctttcctgagcacaggaggccgaggctgcagtgagccactgtactccagcctgagtgacagtgagacgttgtctcaaaaaaaaaagttacctacgttttactcctttctctaagtttaaatcccccaagagattaaaataatttcaatgacaatctgagaatttctgaggttaaggagaggctgccctttgaaaaggtggaggtgagagattttataactgagataatttgtaaataagggtataactgatcttacaggagatgtgaatataaggctatctgtgtagtttatatgggtcaatattttgtatttaatttctctatacactactagagataacatatatttgttttaatccagaagaagcaaatattctgaagtcttttttctttccattttttaccagtagactattaaacgaagataaagtcattattagagctatattgtcatcatattttcagaacagttgtttcctcagttattcatttagtctgggttggacttcccaagggggaaaccaatatcccaagagtctggcacagttaagtagttccagatggcttgcagtaataatgagggtggacactttaaaaatggcttggaaaagaaaatcgctggttatagacactaataattcagttacattgaattgtgtgaatcattaatgactttggattaggtcagaaaatcattaaactttatctaatttacaaatatataaatggaaaaatatatggattcatgttatataataccaatttttaagttgcacatttttttctcattcaaaaataataaacgttcacatttattaaataaagaagtggagaacattcacataagcaaaaagaggaaaaataccattcattgttaatcatgctttccaggtttttctcctgcttctcaggctatcccacttcttctctgtgagcttttaatattctgcctacccctttaatattggtgttctgtccttgaccttcttttgtctggttgacttatttgtccctagtcaatatcaatctgtcacatgacttcagttattgtagttatgctaaaggctcccaactctatctccatcctttctttgactgctagaacagctttacctagatgtcaaaatttcctcagattaaactgtctaaaacagaattcagtcctccaaccctctttacggcccccaaaacaaacaaaaccaaaacctgatactctttctggtgggtccatccctgacttctcctttccctgacttctcctttcacctctcacattcagtcacatcttgttaattctacctcgtaaatacctcttaaatatgtctttcttcattcccactgtcattgtcatctcttgccagtcttacccttctgcaatatattttccccagtgtagccaaaatgtttaattgtcacactgcttaaacatttttaccctttacccagagttagccaaactctaaggttaagggcacagtcttctactctgccaagtctgctcaagacttctgatcctattgtaaggggttagggtgcaactacaaatttcaaatgaagatgctatgcaaaacctcacttctaacatcaactgcaagtttgggggtttccccaaaccaccctcagattcagtaatgcactagaaaaactcatagaactcactgaaagctattatacttagagatacagttcattacaaagacaagctacaaattagtcaaaggaagagagatgcctagggtatagtctaagagggttgcagatatgaaacttccattgttctcagggaatataccttccataccctcccagcatgaatgtgtggatgtatggaaatacacacaaggtattgcccacccaagaagttcacctaaactttagtgtgtctggagtttgtgttttgttttttaaagagatggggtctcactatattscctacgctggattcaaactcctggctcaaatgatcttcttacctcagcagagttttcattgagatttattgattgtttgcatggttgaactcagtttccagtctcccctctccagaggttaggctgatactatgtggttcaagggacccatcatgaatagtaagaatactcatattactccagaaattccaggggcttagaggttacctcccaggagctgggggcaacatctggacctctctttggacaagttttttactccacatccttcatcacctatctctcttttgccctctagataaaatccaaaggtaagggcttataatcttacttcattagttttatttctggaatcactatccacccacttcatcccagctctacccctccagaaactacacttcagctatattaaactaatgtatttctttgaaggtattgtgttatcttttgcctctgcacctttgcacatagtatatttttccctctgcttggaatactatgttcccccaatagccactcccaacacaatccaatttcttacccgttttttagttctctgtttaacacctcttccttgaggaagcctttgcttaccgtcctcacactcatcatgagttaggggtcccttctacgttcctttccataatacccaatgccattcctcttgtaagtacttggtttaatttattattttttgtcagcaaatatttatatctccgtcactagaccagaggtctccaaagtcaattgcacctaaaatacttcatttcggcaaaggaagaaaacattatcatctgtttatttgtgtataacatacgaaattaagtgctataaatatttgacatgtttattgagattggcaacttgttctgtatgacgactgatttcatgtgaagcatggtaagtgtggtattctgagggagtgcaaattccacagcttatgggggttgaccgtggcatcctttctccaatttttaggccattacaaactattacagtttatctgtgcctgagtaaatagatttatggattatatttcctggttttaacaaaattagccctcatgaaatggaaaattggctttaaaagttcctgtgaagatggctgggcttggtggctcattcctgtaatcccaacactttgggaggctgaggcaggcagattgcttgagtcttggagttcgagaccagactgggcaacatggcaaggccccrtctctacaaaacttagttcagctactcaggaggctgagatgggaggactgcttgagcccaggaggttgaggttgcagtgaaccatgatcatgtcactgcactccagcctgggtaacagagtgagaccttgtttcaaaaaaaaaaagtttctatgacaaaatcatgagttaaacataatattgataatgcaagtgtaagaaacataaaagttaagagcttatagttctctcacgcttactacatatgaatttgtatggtcaacatatgtgtttaaaaaatttgttttgggccgggcgcggtggctcacgcctgtaatcccagcactttgggaggccgaggcgggcggatcacgaggtcaggagatcgagaccatcccggctaaaacggtgaaacctcgtctctactaaaaatacaaaaaaattagccgggcatagtggcgggcgcctgtagtcccagctacttgggaggctgaggcaggagaatggcgtgaacccgggaggcggagcttgcagtgagccgagatcccgccactgcactccagcctgggcgacagagcgagactccgtctcaaaaaaaaaaaaaaaaaaatttgttttggtaactagctattttgaggttaaacttaaaacaaaattcatgttgatccatgtagatctagttctttcattgtagctactgtatatcattctatagtatgattatactatgatttatccaatctcctattgatggacatgtcagttgtttttaatttttacacatatattaagttaatactgactgctctaatggatacatccccaaatctcaaaggcttaacataatgttagtttatttcttgcttatatagagttccttcagtggagaaggaggagctgtgttctgtgaagtcattarggaacccaggctgatggagactctgtcctttttaacctgtggtttccaacgttgctctaggcatcaacatttatccagcaaatataagggagtagagaatggtgtttgaggtttttaagggccagtccttagaagtggcatatatcacttctgttcattttccattggctagaattcaagtcatatgacaccacctgggacctacatttcctaaaaaagggggctgggaaataaattgctggcttggcagttaattccaagaaacaactctacactatggacaaagagtacaaaatcttggtgggtagcttggtggctcctgccctacagataatgctagtttggacatgtctccttgtgcatatgttcctaggtttcttgggtatgtttctagaagtggaaatgtcagattgatataagtacattttaaatttattaggtattgccaaattgttttgtccagcagtactgtatgaggagtctgatttctctacgttcttgctaccatttgaactgccataccgtgaagcttgtattttaacacagttgtgttccattattgctactgaaccatgtaggaaagaatgcttatagctgaatatgatcttgatttagggcattttagaagagggcattatgattccataatgatttataagatcactaaagaaacattaccattgttgtcttttatggatgcctaaaagtctaaactgcctaaagtccaataggaatataatatgagccacatatagtttaaaattttctattaaccacctttttaaaattaaaaagaaacaggtgaatttagttaaaaaaacttattttaactcaatatatccaaaatattactatttcaacatgtaatccatattaagatattattaataaaatattttatatttttataccaagtttttaaaatcctgtgtgtactttacacttacagtacatcccaatttggagtatcacatttcaaatacttaataattatatggggctaatggctaccataacaaacaattttgttttagatttgctattttttaaaaaaaccacaactacaacaacaaaaactttaattctgtaacacatatctaaccatttttaattaatatttaaaattaatgaggaaatataacatttcatattaaattagagactggcatttcatattgacattagagccacttagctgggtgcagtgcctcacccttgtagtaccagcactttgggagccagcctgttgcccaagctggagtgcagtggcgtgaacacacctcactgcagcctcaaacttctgggctcaaggggtcatcctgcctcagcctctcaagtagttggcagtacaggcatgtgcygtcatgcctggctagtttcttctcttttggtttgttttttttgtttttgaaacagagtctcgctctgtcacccgggctggagtgtagtggctcartcatggctcattgcatccttgacttcccaagctcccaagtagctgggactacaagcacatgccaccatgctcggctaatttttatattttttgtagagatgaggtttcgccatgttagccaggctggtttcaaactcctggcctcaagtaatccatccacctcagcctcccaaagtgctggaattgcaggtgtgagccaccatgcccagcctactagttgttttctttccaggtttgtataggcctattatcatcatcatctttctctttattattattttccttttctgctctcccatgaaaggtagaggataagggaagaaaaagaagaaagtattccattcccacatccctttaggttggcttcttattttatgtttttgttggtgtgtttattttgctttgttaacattttcaactagctatagaaacgtttgcaattcttattactgattagcattccaaaactttgtaatgaacatttttctttctttctttttttttttttttttgagacagggtctcgctctgtcaccaagctggagtgcagtgacacgatctcggctcactgcawyttccaacttcctggttcaagtgattcttttgcctcagcctcccgagtagctgggattacaggcacgcatcaccatgcccagctaatttttgtgtttttagtagagacgtagtttcaccatgttggccaggatggtcttgaaatcctgatcttgtgatcctccagccttggcctcccaaagtgctgggattacaggcgtgagtcaccatgcctggccatttttcatggatttaaaacagtatcctcatgtgaattatttgagaatattgtgaacaatgacaagtttgaagtataatactatatgaagagtaatgaactgtttaaaagattgagagtattcttaattcttcatgtatattttcactgaatactctggtgtatagctctgagaaagactagttcattactacctagcgtagtttaagaaagaaaaagaaccaaaagaataatytcctggttagaagtatgaaagataatttttttcctggtgacttgattccataatgatttataagatcactatagaaacattaccattgttgtcttttatggattaaagtatttgacctgctttttaccacaaagcacaacctctggtctttaatatttttgtagtttctttttttttttttttttttccaagatggtgtctcgttctgttgcccaggctggagtgcagtggcccagtctcggcgcactgcaacctccgcctcccaagttcaagcgattctcctgccttagcctcccaagtagctgggattataggtgtgcactaccacacctggctaatttttgtattttattagaggcagagtttcaccatgttggccaggctggtctggaactcctgacctcaggtcatccaccctacttggcctcccaaagtgctgggattacaggtgtgagccactgcacctggcttatttttgtaatttctgtttttttttttttttttttttttgagatggagtctcgctctgctgcccaggctggagtgcagtggcacgatctcggctcactgcaacctccgcctcccaggttcaagcgattctcctgactcagcctcctgagtagcttggattacaggtgcgggccaccacacctggctaatttttgcatttttagtagagacagggtttcatcatgttggtcaggctggtctcgaactcccgacctcatgttctgtccgcctcagcctcccaaagtgctgggattacaggtgtgagctactgcacccagcctgtaatttcttagtcacatttttctatgttgtgaatctaaatacaaaaactaagatactagtaagcctgtttttttgagaagtatattgtactatatgtgtgtgtatacacacacacacacacacacacacacagtaaaaaatactaaaaggctaaaatgctaaagggcaagaattaggttgtaaacatgttctttatgcaatctaatatgttattacataaatatgagatgacaatcattaaattcasctatcactgattttgcaaaaggaatgatctcttaagttctgagatttgatttctggcaactctgaatatttattagttcaaagtggttcaaggcagcttataaatagttttatttattacttggaaagatattggtcctattattcacaatatacttatatataatcagagaaacaaaaatattttcagctttttcggggtcacatggaaagttaactataatctagaaacaattttcagtgtttcaaaacaaaaacagttttgtgtctaataaaaaccctttgcccaggatattctctcatcttggattgataagtatctttctgtaagagttaacagtgtaaacttgcagagggtcagcattgtctacacccaaaataacaattgtacaagtatgaatagtagacacctgttcctgtttctcttgctgctgtgtactatattcagtgagacctcgtttaggcattgttttatatttattacctcttttaatcatcataaaaatatatgataaagatttttatcattaacctgttttgcagatgaaaaagctgaggcacacagaatttaaagaacaagttttcaccatcagcagtgtcaccaggacattaacctaggcagtcagacttgagagattataattatgatgttcattttatgattctcatgctacattacaaacatttcctacggggaaaaatttcaatgcaaatgtagaaattgaattttgattactgccatttgcttagctcaggcttttatcacttcttgccttgattaccttagtagcctcccaacaaatttccctgacactggtcttttttccttttaatctagcttcactggattttccagcattattgaacttactatggttctcttttaaaattatttatttatttatttatttggagatggagtttcgctcttgttgctcaggctggagtgcaatggcacgatctcagctcaccgcaacctccgcctcctgggttcaagtgattctcctgccttaggctcccgagtagctgggattacaggcatgcaccaccacgctgggctaattttgtatttttagtagagatggggtttctccatgtcggtcagactggtctcgaactcccgacctcaggtgatccgyccacctcggcctcccaaagtgctgggattacaggtgtgagccaccacgcccagcctaaaatttatacttatttatttatttagagacagagtctcactctgttacccaggctggagtgcagtggtgcgatcttggctcactgcagcctccacctcctaggttcaaaggattctcctgcctcatcctcccaagtagctgggattacaggtgcctgccaccttgcccagctaattttttgtattttgagtagagatggggtttcaccatgttggccaggctggtctcaaactcctggcctcaagtgatctgcccgcctcagcctctgaaagtgctaggactacaggcatgagccactgtgccctgctattttttaaaatagagatggcggtctctattttgcccagggtggtctcaaattcctaggctcaagtgatccacccaccttggcctcccaaagtgctaggattgtaggtatgagctaccttgcctggcccttaccctgattctctaaagatacgttatttcctgtctttctgcctttgtagatgctgtttcttctccaaagagcatccgcttccctgactaactagaataaaccttcctttggaggcggatagggtggttggatttttattttatcttccacccaaaaaagtatcttgttcaggcattacctatagataagagccgtctaagggttttgcaccaaatatttctctaaactcttgcctctaatgaaagaaaagaaaaagttaacaattattgctgtttatttttatttttattttattttattttttgagacagagtttcactcttgttgcccaggctggagtgcaatggcacggtgttggctcaccacaacctctgcctcccgggttaaagtgattctcctgtctcagcctcccaagtagctgggattacaggcatatgccactatgtctggctaattttgtatttttaatagagacagggtttctccatgttggtcaggctggtcttggactcccgacctcaggtgttccacctgcctcagcttcccaaatggctgggattacaggtgtgagccaatgcgcctggcctattgctgtttattaaaaacataatttagaatccagaaattctttaaacaatagactgaaaaaaatagttcacagcttggtatatggcttataacaatggcaaaaattaaaaaaaaatgcattatttttcacttactaagatgcctggagatatttttttccatttagtacttgactaatcttgcaatctgtttaaatttttcaatttcattactaattatttaaatagctgaaggtacctattttctatataattttaattcctaatgcagccatcatctactcaacaaatgtctcctttggaaagaaatcctgttttttttggttctttaagtaaaaagagagactgggctcagtggctcccgcctataattccagcactttgggaggtcaaggtgggtggatggcttgagctcccaagtttgagaccaacctgggcaacatgacaaaaccctgtctctaccaaaaaaatacaaaaattagctgggcatggcggtgtgtacctgtagtcccagctactcgggaggctgaggtgggaggatgatctgaacctgggaggctgccctgagcccgggaggcggaggttgcagtgaatcaagatcgcaccactgcactccagcctgagtgatagagccagaccttgtctcaaaaagtatatataaaaatgaaaagagaaatatttttgtttagtttgcaatctgtattaatgtcatatattaagtatctgatcttttagaagccagtaaaacacatatgggtcatataagcagtggattggccaggtgtggtggctcatgcctgtaatcccagcacttcgggaggctgaggcaggcagatcacttgaggtcaggagttcgagaccagcctgaccaacatggcaaaaccccgtctctactaaaaatacaaaaattagatgggcatggtggtgcacacttgtagtcccagctattcaggaggttgaggcaggagaattgcttgagcccaggaggtggaggttatagtgaactgagattgtgccactgcattccagcctgggtgacagagcaaaactctatctaaaaaaaacaacaacaacaagaaaaaaccagtggattataaattgacataaaacattatcacttgtattctaaaagagtcatggattataaccctcaccattgtatccatatactgtaacatagttttggaatcatcattgcaaaatcgttattcctttgcataatgagtttaaaaatggctcaaagtaaagcttgtctttcagaagcagaattccattttatatattaaaatacccagtttatgtttaagtataatattaaggtaaaactatccttgactatcaaggaaaagaggtgatattagctttagtgcaggtctgtaaaaaatacattgaagattaaaatataattgagctgggcatgctggcatactcctttagttccagctactccagaggaggagcaagaggatcacttgaacccaggagatcaaggctgtagtacactatgattgcaccctgtgaagagccactgcactccagcccgggcaacatagtgagaccccatttttaaattaaacaagtaaaatatattgattatcaaatataaaataaaagygttctctcagattgagaccttacaaatgaatagcaaaaattagtgcctcaatgttgttcaaaccagctaattaaacatcacaatggaaaaatctgttaagtattacattaagtaattaggatatttttatgttcttatataggttgaaattatcaaaccatgaaactgaattttttctcccttccccaaagactataaaagattttaattaattaagctttctgtattgagaattcccttggttttaagaagctttctattttactgtaacttttcttttttttttttttttaggcggagtctcactttgtcgccaggctggagtgcagtggcacaatctcggcacgctgcagcctccgcctcctgggttcaagtgattcttctgcctcagccttccaagtagctgggactacaggcgcatgccaccacgcccaactaatttttgtatttttagtagagatggggtttcaccatgttggccaggatagtctttatctcttgaccttgtgatctgcccaccttggcctcccaaagtgctgggattacaggcgtgagccaccacacccagctattttactgtaacttttctaagtggtcgacaaataaagatagtcttatgtgtggcttggtaatttttgtggttaatatataatatgaaaaaattataggttccatgcatatatgatcagccatgtcaaagcaagtattgagttgtttggcatttcatagtatgtatagttaaaagtagattctaaaaaaaaaaatgattaaggccgggcatggtggctcccagcactttgggaggccgaggcgggtggatcacaaggtcaagagatcgagaccagcctggccaacatggtgaaaccccgtctctactaaaaatacaaaaattagccagatgtggtgacgggcgcctgttgtcccagctactcaggaggctgaggcaggagaatcgcttgaacctgggaggtggagttgcagtgagcccagttcgcgccactgcactccagcctggcaacagagtgagactccatctcaaaaaaaaaagaaaaagaagaagataaaaaagaaagaaaaggaaaatatatgattaaagacagtattctttaaaaaaaaaatgacatcaatgagtttattttcttattcatttgttttccacctcattacagaatggatttcaagtggcaaattaattttttataatggaagtaatatttattcatcaaaaattaagtacttaccatatgccaaacactgtgctaaatgctacttattcagagataaacgtgttcctttcctcaagaagtgtgcagtttagaggaaaagtcaggcaagttaaccagcaagtacaatacaatgtgaacatgttattataactctactatgtgtgaagtgatatactgagcaccttacatactgttattctctatttttcagataaggaaattaattcttagagacattaggtaacttgtccaaggtcacacagtaagtgttagaatcagaatttgaactcaggtgtgtctgactccaaagcttgttatcttgctgcctctgtacagtatactgattagagttaagatatagatgcaggctgggcgcggtggctcaygcctgtaatctcagcactttgggaggccaaggcaggggatcacaaggtcaagagatcaagaccatcctggccaatatggtgaaaccccgtctctactaaaaatacaaaaattagccaggtgtggtggcgtgcgcctgtagccccagctactcaggaggctgaggcaggagaattgcttgaacttgggaggcagaggttgcagtgagccaagatcgtgctactgcactccagcctggtgacagagcaagactccatctaaaaaaaaaaaaaagatatagcaatgcagaggattttatggggacactgagacacatttgccaaagtagtcccttggattttggaaggggacacttaaattaggtttagaagactcaataagaattagccaagaggaagagggagctgaaaagcattccaccagagacattaccatgtgcaaaggcatggagatgagaaagcatagcacatttggtacttgtctggctaacttttatttctcttaataaaggagggtaaacctgcaaggaaaaccagagaatgacctgaaagtcattcattcatatattcagttactactgggcactgtagactctgtatttgctgtatttctagggagatactggaatttttaaactaaaagtcacagacatgtcacatatgttaaacaacataccaaataatcaggaaatagaagagtcttaaaatcttccgccctgtagtttgttttatttggctattagaacagtgtcttctaaattgtaaaatatctttctctctcttttttttttttcctctgatcgtttctctcatcattctacctgatgccaagctgtgtggggattttagaacttgaagactgcctaaactgttcccatttcaactatgcttaaatcctatttacttcctaaagatttgtaaaaggataagtatgtttctctttatcagtattcactgtgtgactttatcttttagaggataaatgtactaaaagtactaaaacagatcctttcaaggacatgtctggagagatagaagcatactgagttgctgagtagtatacaagacaacacaagaccatgacctataaatcaacatgtaaaacttaggaggtagagaataacttttccgtgtttgaaggggtttgaaggggtgatcttcatggatacatttatcattcagtgagataattttttattagtttaatttttccatccttacagtctaaagagacaggcttcaacactcgtttcaaatgctgtatcttactagaagaatttccctgaggtcaggtggaagtatcattccctcccatgaactaccccagtattgtaccaaaagacatttggtaattccttcctttgtattataagtcatttatatgcatttcttatctcttttattaaattgtaccttccttgaagcagaattcatgtttgatccacagcactaagccttgtacatatgaggcactgagttaatatttaatgaattaaaacatagcacatatattataaactaaattattaggcagtgtttcttaagtgttgaacgtgaattacctacatcaaaattatctcgagtgttttgttaaaatgcaaattcctgtgctcctgcccgcgcctactgaatgagaatttctatgggttccgggaatctgttttgaataaaaattgtaggtaattggctgggtgcggtggctcatgcctctaatcccagcactttgggaggctgagacaggcggatcagttgaggtcaggagttccagaccagtctggccaacatggtgaaaccctgtctctactaaaaatacaaaaattagctgggtgtggtgacacacgcctgtaatcccagctactcaggaggctgaggcaggagaatcacttgaaccagggaggcagatgttgtagtgagctgagatcgcgccattgcactccagcctgggtgacaagagggaaactctgtcccccccccccaaaaaaaacattataggtaattatggtgcatactaaagtctgagaaccactgcattagggagaatgtaagaatccaaattaaagttacatttatttgaaaggacagatgtatatcttggtaaaaattataaacattagtacatggtggagtataaaatataagaaagtgaataaatagatattttcagtgcaaatttttctttatcacaggaccagtgttcaatattttggaaagttcaatctaaaaaagcatatttaggtataaataattttaaatattggccattttctgtgaatgcatgtgaaataaagcaccatggttttataattaaagactaagaaaagacatattggacatcatatctgcacatccttatattgctagatgcaaagattgccttttagggcatgcttctttataaaatagtttgtaactaatagtactgtcagaaatactgtagtttagataatatttaacatattttgctccttatttttctgtaacaacacattatattgttatgtttatttgtagattttcttatttgtgtatgttttatctgtgattttttaaaaatgtgaaattgttgttagaataccatttatcttggcttatgcattattgaattgataaggactaagataagctatagcaagcaagtaatataaatcttcatctgggtagttcttttttttttttggagactgagtcttcctctgtctccaggctggagtgcagtggcgtgatctcggctcactgcaacctctgcctcctgggttcaagcgattctcctgcctcagcctcctgagtagctgggactacaggcacacgccaccaggcccagctaatttttgtagttttagtagagatgaggtttcaccttgttggccgggatgcttgtgatctcttgatcacgtgatccagctgcctcggcctcccaaagtgctggaattacaggtgtgataaaatagttttataaacctaagctgtatttataatggtaatacaaataagaaatgtttaaaataatgcttgtaatgtagaacactggtccaagtattttacatacattaattcatttaatcctcatgacaactaaataagatagacactgttattatccttatattccaagtaaggaaactgaggtataggttaagcgatctaagtttacacaactgataagtagctaggatatgagccagtataatctagcttcagagtcagcattctcaaccgctctataataatgttattattgtatttttaattagcaatttgtttgattttgtcataatcattatcagatcttccagcagttacatggcagatattttcaagtaaatattttaaacaaattcagcctatatctaaacaatatcttttaaaaattatttttaatgctattcttacttttactgattatatgtagtaatattgagatttcttaagaatagttggggccgggcgcagtggctcacgcctgtaatcctagcactttgggaggccgaggcgggtggatcatgaggtcaggagatcgagaccatcctggctaacaaggtgaaaccccgtctctactaaaaatacaaaaaattagccgggcgcggtggcgggcgcctgtagtcccagctactcgggaggctgaggcaggagaatggcgtgaacccgggaagcagagcttgcagtgagccgagattgcgccactgcagtccgcagtccggcctgggcgacagagcgagactccgtctcaaaaaaaaaaaaaaaaaaaaaaaaaaaaagaatagttggatttcagaggattgttttaacctcccatttttggtgtttgtgatggtggtagatggtcatttaacttaaaaataaataaataaataaaaaataaaggccagacatggtggctcacgcactttgggaggccaaggctgtgaggattgcttgagcccaggagtttgagaccagcctgggcaacatagtgaaaccctgtctctacaaaaaccttttaaaaattagccagacatgctggtgcgcctctgtagtcccagctacttaggaggctgagataggaggatcccttgagcccaggagtttgtggttgcagtgagccatgatcgcaccactgcactccagcctggatgacagaggagaccctgtctccaaaaaaaagcagggagagccttgattgacccaaatgaaaatctagtaattttaattttcagaagctgttagaacacataatggattcttacgacaaaatctagataaatttgcataccaattttgaaaaattatatataaaatatgtttagtaatgtacatttctttctgctaaaaagcactagtttttctctacaaaaatgcatttttaaattaatgtctctctggtacacaggaataaaatatttgtccttgatctgtgtcatttcctcattttaaattcaccaaatagtttattttaggtgtcatttattgctttattttaataaatactgaaaatgattaaccacattgtagaaatacccaacttatgaactcatgaatattgggctatgttttaatatgtaaattatgtttaaaaattaatctgtttcttcaaaacattaacttgcctaagtggtttaattgaataccatcagactctgttataatcaggacagctcagaagaagagaactaaattagagagaaacccagaatggaaaataagggagagtttaatgmttagaataaagagttagaaaagaggaggtgggctataggaatctttaataagaagattatagggctgggtgcagtggctcatgactgtaatcccaacactttggaggatgaagcaggaagattgcttgaaccctggagtttgagaccagcctgggcaacatagcaagtccccggctttacaaaaaaaattagccaggcatggtagtgcctgcctgtactcctagctacatggcaggctgaggaaggaggatcccttaagctctgaacttggaggctgcagtgaaccattcaaccaccattgaaccccagcttgggtgacagagtgagaccttgtccccccacctcaaaaaaatcatagatatgcccaaacattttgctcttaatagcataattaagatatttttattttcaatgcaaatttgtaatcttaaattgaaaaactttatgaacattgaattatccgtggaactcaaaggaaaaaggatcactgtaattttatattttacaggagaaaagatttcttgaacttttttgctttgatctatattttgtcatttcattgagagtagaaaaagaatgcatcactttttataaacaaaatatttttcttttctaaatatgacaccagtatgaaacttacccaaggtgtttaagtgtttaaaatgtaaactgaagatttgattgttattaaagtatcattttacctgttggctgagaggattcagcatagtgcgagggagtgggaacaagtacctataagtatacatagggcaattaataactgttgaaagaatgataatatcctgtttctcaaataaacagaattttaccttactacacaaagaatttaattcaatttagtctatggagtttcctactagaatataagctccagactttcttttgctcaccatcctatcctcagtacctaggatactgaatgcttaggacatagaaggttttcagaaagtacttaatgaataaaatatatgcttaacacattttttattgtggcaaaatatacatcacttattggtttgatattgttgttgttgttttgaaccaagattttgctccatcgcccaggctggagtacggtggcatgatcatggctcactgcagcctcggcctctgggtctcaatcggtcttcccatctcagcctcctgagtagctagctgggactacaggtgtgtgccagtacacacagctattttttttttatttttctgagatggagtcttgctctgttgcccaggctggagtgcagtggcctgatctcggctccctgcaaactccgcctggcaggttcaaacaattatcctgcctcagcctcctaagcagctggaattacaggcgtgtgccaccaaccctggctaatctttgtatttttagtagagacggggtttcaccatgttggccaggctggtcttgaactcctgacctcaggtgatccacctgccttggcctcccaaagtgttgggattacagacatcagccactgtggctggccatcttttttttttttttttttttttgagacggagtcttgctttgtttcccagcctggagagtgcagtgtcatgatcttggctcactgcaacttctgcctgtcgggttcaagcagttctcgtgcctcagcctcccaaatagctgggactacaggcatgtgccaccatgcctcactaatttttatattctttgtagagatggggtttcaccacgttgcccaggctggtctcaaactcctgggctcaagcaatctgcccgcctcagcttcccagagctgaaattacaactctgattctcaggctgagattacaggcctgagccacagctcctggccctaatttatgttttacatagcgttttgttctgattagatacaagccatatgctcattataggaatttttgaaactatggggaaaaagaacaaaacttacttgtattttgccactccaaagagccatcctttaggaatagttttctctatttctttttttctattcaaatataactaaattgagatgatacatacatatatatatatatatatatatatatatatatatatatatatatgtagtattgtgccctgcttttttccttcaacactttcaagtgagcactttttaaaatcattaaacgttccttgaaaacataatgttgaaatgttagtgtgattttgctcaaaattcacagtaggagatatattttattttgtgattaaggccacatgtacatatttaattgtatcaaaaaattgtaaaacagtattaagggtaatgaattctgatttttttttttttttttgagtcggagttttgctcttgttgcccaagctggagtgcaatggtgcgatcttggctcactgcaacctccgcttcctgggttcaagcaattctcctgctcctcccgagtagctgggattataggcatgcaccaccacacccagctagttttttgtatttttagtagaaacggggtttcaccatgtttgccagtctggtctcgaacttccgacctcaggtgatctgcccgcctcagcctcccaaagtgctgggattatagacgtgagccaccatgcccagcctgcattctgatattatctgttgtattttattctttaaaatatgcttgttccatccctttgaagtgattttgtatttcactaatggattgcagcctgaagttggaaaaatgtctcttgtatgaatattctgtaattcaattatgacccttttattggacaaatttggttcagatttttgccagtagatgtatttaaaagtgtatgtgactgtatttacaaaagtaattaaggctgactgtaataaattattcccaaagtgctaaaatgtaagtcttccttatcagtttgttgtatattttttcagatttttgtatgcattcattcactctctatgtcaatatctatctttacacacttttttttcctaaacataatgtgattattctactacaactttaaattttttaaaagtgtatcatggctgtcttttcagatcaacatgtaaagatttacctcattcttttgtctgctgcatagtgctccgttacaggtggatcataatttaactttcccattattaatgaagattgtgatgcttccaattttttgtgttacaaagaatgctgcagtggccattcatatatgtagatctttttgcatacctgcgtatattttagtagaatagattttcctggaattgaggttgttgaaatatagggtatgcatgcttaaaatcttttcttaaattcttcaacttatccttcagaacatttatatcatttacctccaactccaatagtatatataagaaaaaggctggatgccatggctcacgcctgtaatcccagcactttgggagaccaaggcaggtagattgcttgagcccaggagttcgagaccagcctgggcaacatggtgaaaccctgtctccacaaaaattagccaggcatggtggcacacacctgtggtcctagctactcaggaggctgaggtgggaggatcacctgaggctggggaggtcgagcagtagatactttcaattttaatttttgccaatctgatgagcaagaaagatacatttgatttgaatgtattggcttggcatcttttcacatgcttattggtgttttatatttcttctgtgatttgcttgtttatatctttaatgaacttttgtatttttattatagatttgtgggaaatctttatgtattatggatattagccacttgagtatcatgtgttacaaatggcttctcccagtctataagatgtcttaaaactttacaagagaatctttttctatatagaagttaaaatttttgtacttggtcacattggctaatttttttctttatggcttctgggatttgtattatgtttaaagggtctaactgaccttgcctacctactgtcttctatgttcctctagatatttatagctttttatgttcattgggaatttttgtattggataccaccacgtataaatagttcaaattgatatatctaattattacttctgataagtaaataattcttttaattagaaagattgaaaagtttgtgaaaggagttttaattttgtcaaaatgcttaaattgaaacctggaagtctataatggtaaatatagttggctaaggcatgaatataagatttataaaagattggtataatggtagatactttttggataggaaaatatttaaataaaagtgcagatgtctttttttttttttttttttgaaacggagtctttctctgttgcccaggctggagtgcagtgtcacgatctcagctcactgcaacctccacctcctgggttcaagtgattctcctgccccagcctcctgagtagctgggattacaggcatctgccaccacaccaggctaatttttgtatttctagtagagacggggttttgccacattggccaagctggtctccaactcctgacctcagatgatccacccgcctcagcctcccaaagttctaggattatagttgtcagccaccgtgcctggcccaaaagtgcagatttctaagcagtcttcatggccaaccaaattcatttgaatttaactatgggtgtttcacaaattcttgccttgctgacattttcgtcttagattgtaagggaaaaaatatatttgtatgagaagtcttgagggatatacaccaaattattaacaatgatttttttggggccaggcacggtggctgatgcctataatcccagcactttcggaggctgaggcaggcggatcacctgaggtcagagttccataccagcgaaaccccgtccctactgaaaatacaacattagctgggcatggtggtgcatacctgtaatcccaggtactcgggaggctgaggcaggagaatcacttgaacacagtaggtagaggttgcagtgagccaagatcacgcctgtgcactccagcctgggcaacagagcaagactccgtctcaaaagaaaaaaaaaataaaataaaatgcagtgattttttcttgggatggtaagatttcagatttttgtaaacttttttacttattatgttttaagttttttttccaacaaaaaatgttatttgtttagtaaatatagaacagataaaggattaaatgaagggtactgttgctctgcatctatttatagccaatgaggaagaattgcttggtgggtaggaatgatagaaacctctggagacaaagtgaccagattattaaagtttgtgatagctaggatggagaattctagaaggagccacatacacatattgtctacatggtaggaagaaggctttaaaaaaattgaacaaaaaataagtaatcatgaccttatgagctaagacttggaaaattgggaaacattaaaacataattatataattatacagttataaattataacaatgagtgttttttaaaaggcaagtgcaactaaaactactgtgacttcacttgcaacaatcttaactcaggtttttgttttttttttttttgagatggagtcttggtgtgtcacccaggatggagtgcagtggtgtgatcttggctcactgcaaagtctgcctcccaggttcaagtgattttcctgcctcagcctcccaagtagctgggattacaggtgcgtgccaccacgcctggctaattttttttttttttgtattttttaatagagacggggtttcaccaagttgatcaggctggtcttgaacacctgacctcaggtgatctgtccacctcggcctcccaaagtgctgggattacaggcatgaaccaccgtacctggccttaactcaggttttataaaggatatttataaaagatgaatatagaaaagtgacaaacataagtgtggcagaataattaaaattaagaattaacagatgtgaggaatatattaaagataattttaaagattttagaattatattcagaaacaggaatatggaaaatgtatgcttttttaatactaacagctcctattttgtttccatattttccatcaaggagaataatatttattctgtaagaacaacaacaaatcacttagtaaagtagaattaaagtccaatataggtgaaattaagaaagtatcttaactactcaatatgactttgttttctaacctgaactaattatatctgagattgctatgaacttgtaggtaagaaagttcaactttgaggaattattgagaatagaaaaatgccagaggattggaggtaagcaatgagtaaggactttgacagcatgatgatcacattcagaaatgacaaagcttgatggaccttcatgcaaacagtaaaaataatttgaaagtctgtagcaacaaggagttaacagattggtttaaataagtataactaaatatataatcctgaatttgggttggaaaaaaccatttgaaagaagaattgatgaaggataaatagcctaataggagcatttatgacaaagggaattttattgttgataaacttaattgtgaatcagccataagatttgcctgccaaaatttaattactgtagttttttgaataaaggaggttggttaggcctggacttggcatgtatccagatttaggtactacctttgagaaaattggcgtatgtccaaatgacagcagtatcagccctttctcatgtggcaaaagaattagacttaatctagccataaaagcagctctgggacataagcccaaaagaaggaagaattttctagtgattagagctgtctagagaataaacaggatgcttcgagaggcagtagtatatttgtgtagtggttttgtttgtttttttgagatggagtcccactctgttacccaggctggagtgcaatggcgtgatctcggcccactgcaacctcctacccccaggttcaagcgattctcttgcatcagcctcccgagtagctgggattacaggtgaccaccaccacgcccagctacttttttctgtatttttartagagacagggtttcgacatgctggccaggctggtctcaaactcctgtcctcaggtgatccacctgcctcagcctcccaaagtgttgggattacaggtgtgagccaccgtgcccggcctgttttttttgttttgttttgttttgttttgagacagagtctcactctgttgcccaggctgaagtgcagtggctcagtctcggctcactgcaacctccacctccctggttgaagcaattctcccaccttagcctcccgagtagctgggattacaggtacgcaccaccacacccagctaattttttgtatttgtagtagagacgggtttcaccatgttggccaggctggtctcgaactcctgacctcaagtgttctgcctaccgaggcctctcaaagtgctgggattacaggcatgagccaccacgtccggtccttgtatagtgtctgaatgaagctagtttactgctttagtaagaatgttatagagtgaatcaaagttcagatgtcttgaatattggtttgattttacattttttcatatggttactggccatttgtatatcttctttggagaaatattcattcaaatcctttaccctcctcccccccaccactttttttttttttttgagacggagtctttatttttttttgagacggagtctcactctgtcgccaggctggagtgcagtggcaccatcttggctcactgcagtctccgcctcccgggttcaagcaatgctcctgcctcagcctcctgagtagctgggattacaggcccgtgccaccacacccagctaatttttgtatttttagtagagacgtagtttccccatgttggccaggatggtctctatctcctgacctcgtgatccgcctgcctcagcctcccaaagtgctgggattacaggcatgagccaccatgcctagccttacccattttttaaattgggttatttatcttttattatttgaattgtaagagttctctatatattctggacagaagtcccttatcatatatgcttagcaagtattttctcccattctgtgagttcttcactttcttgatggtatcatttgcaaccaaagattttcaattttgatatagtccaatttatatattttttcttttgtcacatgtcctttggtgttgcccaatccaaggtcatgaagatttactatgtgttctcttaagagttgtatagttttagcttttcatttaggtctaagatttattttgagataatttgtgtatatagaggagttggagttcaatttgattcttttgcaagtggacatctagttatcctagcaccatatgttggaaaaacttgttctttccctcactgaattgtcctggcactcgaatttttagaagaataatataacttttatttatttatttatttatttatttatttawttattttgagacagagtctcactctgttgcccaggcaagagtgcagtggtataatcatagttcactgcaatcttgaactcccaggttcaattcttctgcctcagcctcccagagtagctagatgtaccacacctggctaatttatatatatatatatatwtatatatatatatatatatatatatatagtagaaccaggatctctttatgttgcccatgctggtcttgaactcctggcctctagtgattttcctgcctcagcctcccaaagtgccgggattacaggcatgagccaccttgcccagccataacttttattttttataaaaaatataataaaaactatggaagataggagagaaagtacagtaaccacgacccccccagtcttagggggatgygttccaagacccccagtggatgactgaactacagatagtaccagacccagttgctgattgtattaattgaaacacgtttcagttcatgttttccacccacaaatttactgccttttccatcttaactgagcacttatcacacactgtggctataacttttgcagtttgaggtgtgacaggaaaactaacatgaatctctttttccttcacaatttcatggggttgggggaagattcattcttaccataaatctcagcaacctcagcatatgatttttttctttcttgaaatcaagaactttcaccttttcactttttttttttttttttgagacagagtctcactctgtcgcccaggctggagtacagtggcgcaatcccggctcacttcaagctccgcctcccgggttcacgccattctcctgcctcagcctcccaagtagctgggactacgggcacctgccaccacacctggctaattttttgtatttttagtagagacggggtttcaccatgttagccaggatggtctccgtctcctgacctcgtgatctgcccgcctcggcctcccaaagtgctgggattacaggtgtgagccatcgggcctggccaccttttcacttttaaggaagcactttatggcttctctttagcatatctgaattgccagcatcactacttttgcaatttgggaccattattaagtaaaataagagttccttgaatacaaacattgctataatgttacctgacagttgatctgatagccagcctggctgctaaattactaacagctggtagcatgcacagcatagatacactggacaaagggatgattcatgtcccaggcaggayggagtgggatgatgcaagatttcatcgggctgctacagaatggcgtgcagtttaaaacttatgaattgtttatttgtagaattttccattaaatatttttggattgcagttgaccatgggtaactaaaacttcaaaaagtaaaaccatgaataaagagagactactgtaatgcataattctgccaccgttacacaacttccatattattgtttttgttgttgcctaatgttcatctgcagtttatacataatttaataattagtcccttattttgaatatttaagtttaatatttattatttaaataacattgcaatcataatmtttgtgcataagctattagctttctattgcttaattttctttgacacatttctgaaaggatttcttctaaacatatattgaaaaccactaggggttagttacataattttgattttgaaaattctgaagtagagggtgttaaataaattggcccatttaacattacaatagcagctgatrcggacctctggctgtgggtcaggcaatgtgccaaatagttgtgtgcataatcatatttagttcttactcaaattctattagataaggaattcaaggctcagaaaagtttgataacttgcccaaagtcatataactagtaaatggcaaagatggcatacagggctgtgtgactctcaaacctcagtggctcccatactggacataaacagttatgatggcaagattcccacagtaatacattagattaaatattttgtacagaaattctctgaatacacatgacttaagtactaatgcattattggcccaaatttttcttttttttcttttcttcttttttttttaacccacagctaatatgatagcttaatatttgtttggtaaaaatggaaatctaaaaatggatttttctctggagatttaataattcgttattcttggacccatggactaatcattttgtattatttccatgtgtgtagcacttaccattccaaagagtctagagagtatacataaccatacagaagttgtttcacttatgagtactttagtaaagaaatggggccaggcacggtggctcacacctgtaatcccagcactttgggaggccgaggcgggcggatcaccaggtcaggagatgagaccatcctggctaacagggtgaaaccccatctctactaaaaatacaaaaaattagccaggcgtggtggcaggcgcctgtagtcccagctactcgggaggctgaggcaggagaatggtgtgaacctgggaggtggagcttgcagtgagccgagatcgcaccactgcactccagcctgggcaacagagtaagactctgtctaaaaaaaaaaaaaaaagaaaagaaagaaaaaaatggttttggccgtgttcagagttttctttaaaacatgaaaatgccagttctgtacaaattcttgttccaaatttctatttttgcagtctttcagcacatcaaactgtataaactttttttcttcttccctgagatggagtcttactctgtcgcccaagctggagtgcagtagcccgatctcagctcactgcaacctctgtctcctaggttcaagcgattctcttgcctcagcctcccaagtagctgggattacaggcgctcggcaccacacccagctaatttttgaacttttagtagagacgaggtttcaccgtgttggcaaggctgatctcgtactcttgacctcaagtgatccacctgcctcggcctcccaaagtgctgggtctgtataaactctttctttccttgattttcatccaaagagttagagtgtatacagattaacaaggtgactggaggtatttgtatgcccttgacagaagagtcacttcagtctgctacaacggtactctttcactacgggtatagtttcacatactattgtgagggaagaaggtacatttacttagcagaagccatccattttatgaaatgccaattccctgaatttacttcttttaaactagttttagttgatcagttttcatcttcttggtaacatttaaaagaatgttcaatttgtttctgctccaattatctgctgctgtttaggaggaggtggacagaaaagaatttctcatattcaaggatataatagcaatgaacgtattttttgtcagtgcagaatttaaagactaagactttaagtctgatcctcttcctttttctgccgcctcagtctctggcaacaatagcagggagttagggcagacaaattgaacattccttttcatgctttatacagattgaaactgatcaactaaagagttaaagaagtgaattcagtgacttgacctttacttgaaatgatttttaataattttagtcagtgatccagaactcacctaagcagccagattagctgagttaatcctaataatgaattgacagatgcttcagttacactgccttcagatcctcaaaattgagaatattcataatggcatatcacaaaatggactatcaagcctaatacataaaatgtacatctgttttggactgaaagattgactaataaaagcaattaagtgatcttttctctagaagtttgtttatactgacttctacacctccagctctacactgttaccagagctcaagcccgtaattctaagaacataagaaacattttacttttcatttcagtatatccaataaagattctgccttgttccacatcaaatagcacctctttaggtttcttcaggctcatacctcattcttttccatcccacccctatttagttattcatctatttctgtcactttttcctttgaaacatgtctcagatttagtcttcattcttgctgcggccaccccagttcagtcttcattactcattgccttctaactttatttttctgattacattcttctttctagtagtaggttaaatttacactgctttcatcatgtgtctccgtgaggtaatcccaggagctctgcaaaattcactagctaatctctgacttaacataggatgtagtatcagaagaatcagctatgatccactagtgcttttcttgctcacttgacagctgcctgctatttgaacaaaaggcatctttattttcattctttcttagatgactctccgatgtgatcctttgcacatatatatggatcacatctgagagtcatttatatatatatatatatataaaatgcaaatacctgcctattattaccttttgatgtgacacacaagaacactgttgcctgtgtcagacattcagcaagcattatagtttagtcccataatctcattttatcaagaagcctaattttgtaggctttggttgtctcattctgccaccagaaagtaaatttcttgaaggcaggcactatagaattttcattctagcrcaatttttgacagtttttatgcatttttgaaatttttattgaataaataagttagttgagcaaatatttattgcatttattgagggcttactctgttccagcaactgtgatgatgtaagcagcactgaaaaggagcagatatggttccttagcgtgatcatagttcattacagcttcaaactcctgggctcaagggatccttctgcctcagcctcctgagtagctaggactacaggtgtatgccaccatgcctagctaattaaaatttttttttttttggatagccagggtcttaccatgttgcccaggctgatctggaacttctggcctcaagcaatccacccactgtggcctttcaaaactggtgacatgagccactgtgcccagcgcggctcttgtcttgagtttatgatctagtgagaaaggcaggtattaaacaaatacatggccagttatgatggtctataatggacatcawcagttccttctctttgtgtatatgcatgctatttttcatgtctagaaatagagtctaattcccctctccttgaatctgggctggtcaatagaatgtggcagaaataaacattttggaactttgaggctagaccttaaggctgtaaagcttgtgtctgggtctctggaaatatttttcttgagataatccctcttaaaacccagtcactctgttgcaagaagctcaagccacatggagaggccttgtgtaggtaacgctgatcaatagccccagctgaacttcaatggccagaatcaactggtcctgtgagtgacccattgtgaacatccagtccagtccagcctttagatgacttcatgccccctactgtcttactgcattcatgtgtgagaagatcgagaactacagatctgagctttgtcaatccacaaaatcttgagagataataaattttttttttttttgagatggagtctcactctgttgcccaggctggagtacagtggcaccaccacagctcactgcaacctccacctcctgggctcaagtgattctcctgcctcagcctccggagtaactgggactacaggtgcccgccaccctgcccggctaatttttttgtatttttagtagagatggggtttcaccatgttggccaggctggtcttgaactcctgacctcaagtgatccacccacctcagcctcccaaagtgcagggattacaggtgtgagccaccgtgcctggcctgagaatgaattgttttaagccactaaatttgagtggtttattatgcagcagtataatacattttggttatctaaccagaatgtaaattatcagattatcagattatgataaatgctataatggacatgaacaggaataaaaggaaaacctaatttagatgattcggagatggcaacatacaattgtttaataatgttttgtctttctgctcaactctgcatttggtgagagcagatactgtcctatttttaactgtgtccccagcacgtggcatatatgctcaatatcttctgaagtaataaygaagaccttttattagtgtctcagagaagtccgtaactccaaaaaggttaagaattactttattaacagcaaaactttcctctttatccacttgtataggaataccacatcctacccaagcacaaaattccaggttttctggactgaatacctacacccaggatcgatgtgaatagggcagtattttcctgccagaggttataggtgatgcctttgagttttggggatttaatcataatgggctacatcacatgtatggaggttacgcaggtaatgagagggactggggccaaggagcacacagatgagtctacttaatggaagaaaactaagcctcagatgaagtctgttattctataaatagcctctgtattccttaaccctttttcctgttattccttccatgaactttctgcttaatttctttcattttaatgtgtttcagggactgattctcctctaaggttgcacctaacacttttcttccttgcccatttcttccctatacaccattcttattcccatctttgtgtctttcttattatgtgtttctcccattttctagggtatttttccttctttctgcttatgtaaatttaatcttttgggagtattttaagtttacttcactggaactttccttgaagattccaagttaaatatgcctctccttcctgagcttctattttacttatttgttcccaggacatgacttttgtcatatccttttgtatcttgccttatacaataataattattatagtaataataattattactatatgatattatatagtaatattatatagtataatatattgtaactaattattattaccacaataatgattactattatttttgagacagagtctgactctgccaccaaggctggagtgcaatggtgtgatcttggctcactgcaatcaatgcctcctggggtcaagccatcctcccacctcagcctcctgagtagctgggactacaggtgtgcaccaccatgccctgctaatttttgtatggttttgtagagacagggtttcaccatgttgcccaggctggtcttgaacttctgagctcaagtgatctgaccgccttgggctcctaaagtgctgaatgctgggactacaagcgtgagccmctgtgcctggctcatatcataattatataatttttcaactctttcctatgtaacatggctataaatacttggaacagtgattattttattttataagaattttactctttttttttttttttttttgagatggagtctcattctgtcaccaggctggagtgcagtggcatgatctcagctcactgcaacctccgcctcctgggttcaagcgattctcctgcctaagcatcctgagtagctgggattataggcacccgccaccacacccagctaatttttgtatttttagtagagacagggtttcaccatgttggccagatctcaatctcttggcctcatgatcygcccgccttggcctctcaaagtgctgggattacaggcatgagccattacgcccagccgaattttactactttttaagtgggtgtttaataattatgttggcttgatagatgctctgcttttcttttttattccatttgaacttgactctctaattcctcttgaattttcctgatttgttatactcccttcttcatcttttaaccttgaatctttgttatttccttctttgctgattcccatgatctttctgtctctactacatgtatatgtaatatatgcacacaaagatatatactactacatataatacactaacatcacattttaaagtaattattaatgcctttgtaaaatatttattattattattattwttttttttgagatggagtcttgctctgtcacccaggctggagtgcagtggcgcgatctcggctcactgcaagctccgcctcccgagttcatgccattttcctgcctcagcctcctgagtagctgggactacaggcacccaccaccatgcctggctaatttttttgtatttttagtagagatggggtttcactgtgttagccaggatggtctcgatctcctgacctggtgatccgcctgcctaggactcccaaagtgctgggattacaagcatgagccactgtgcctggccaaaatatttgttattatgtttatatagtgataaagttaatctacatctgagatctggaatataaattttacattaaatacaatattacttgtttatatctgtacaattctgtatttacaaggtctcaacatctattttatccacatcgataagtagaatttaatacttctatataaactgtgtrtataccacttttattttattttgcgacagggtttcactctgttgcccaagctgaagtgcagcagcgcaatcttggctcactgcaacctctgtctcctgggttcaaacgattttcgcatctcagcctcctgagtagctgggactacaggcatgcaccactgtggcctgatctcagctcactacaacctccgcgtcctgggttcaagcaattctccctgcctcagcctcctgagtaactgggattacagatgcctgccaccacacctggctaatttttgtattttttagtagagacagggttttgccaagttggccaggctgggtataaactcctgacttcaggtgatccgcccacctcagcctcccaaagtgctgggattacaggcaggagccaccatgcctggccaatttttaatttttttttagagacaaggtctccctgtgttgcccaggctggtctcaaactcctgggcttgaaatcctcctgcctcggcctcccaaagtgctgcgattacaggtgtgggccaccatgcctggcccaatttattattatttattttttgaagtattttatgttatttttaacttttagcttcaggggtacatgtgcaagtttgttatatagataaattgcgtgttgtggggtttggtgtacagattatttcatcactcaggtaataagcatagtacccaataggtagtttttcaatcttcactcttctcccactcttcatcttccggtaggccccagtgtctgttgtttccttctttgtgtccatgtgtacttgatgtttaactcccacttataagtgagaacatgcaatgtttggttttctgttcctgtgtaagttcgcttaggataatggccttgagctccatccatgttgctgcaaaggacatgatctcattcttttttatggctgcatagtattccatagtgtatatacaccacattttctttatccagtctaccattgataggcatttatgttgatcccatgtctttgacattgtgaatagtgttgtgatgaacatatatgtacatgtgtcttttttttttttttttttgaggcagagtcttgctctgtcacccagactagagtgcagtggcatgatcttggctcactgcaacttccgcctcccgagttcaagcaatccttgtgcctcagcctcccaagtagctggggttacaggagcccacccccatgcccagctaattttctttgtatctacagtagagacagggtttcaccgtgttggtcaggctggtcttgaactcctgacctcaagtgatctgcctgccttggcctcccaaagtgctgagattacaggcatgatccaccacgcccaacctacatgtgtctttatggtagaatgttttatattttggggggtatatactcaataatgggattgctgggtcaaatggtaattctgttttaagttctttcagaaatcaccaaactgcttttcacaatgggtgaattcacttagattcctgctagcagtgtgtaagtgttccctttttgccacaaccttgccagcatctgttatattttgactttttaataatagccattctggctgggtgtgggggctcatgtctgtaatctcagcactttgggaagctgaggcaggaggatctcttgagcctaggagtttgagaccagcctgggcaacaaagtcagaccctgtctctacaaaaaaatcaaaaaattaactggatgtggtggcgcacgcctgtggtcccagatactcgggaggctgaggcaggaggattgcttaagcccaggaggtagaggttgcagtgaactatgtttgtgccrctgcactgtagcttgggagacagagtgagacgctgtttgaaaacaaaaaacaaaaacagctattctgactggtgtgagatggtatctcattggggttttgacttgcatttctctaatgattagtgatgttgagtattttttcatatgtttgctgggtacatgtatgtctttttttgaagtgtctgttcatatcctttgcccacttttaaatgttttgttttttgcttgtgaacttgtttacgtttcttatagattttggatattagacctttgtcagatgcatagtttgcaaatattttctcccgttctgtagtttgtctgtttactctgttgacagtttcttttgctgtgaagaagctctttagtttagttagatcccttttgtcaattttttttgttgcaattgtttttggagtctgatactgtcacccaggctggagtgcagtggcacaatcatggctcactgcagccatgaactaagctagcctcttcctttagcctctggactggctaagactacagatgcatgccaccattgctggctaattctaaaattttttgtagagacagggtctcattatggttccccaggctagtctcgaattcctggcctcccatgatcctccctccttagcctcccaaagtgctaggattataggtgagagccatcctgcccggcttggttttttcccatggcactttatttatttatttagagacaggggctcactcagtagctgcgactacaggcatgtgccaccaagcctggctaattcttgtatttttgtagagagaagattttgctgtgttgcccaggctggtctcaaactcctgggctcaagtgatctacttgccttggcctcccaaaatgttaggattacaggcgtgagccactgtgcttggcctctrtggcactttaatttgacattgacctttatcttttaattaagtattatttacttttgtttttattctccagcatttatataaaatttttgaggcatatggaaaaattgtaggcattgaacagtgaacacccatatacccacaactttgattctacaattaatgttttactgtatttgctttatcacatcttctatatgtttatacatcattctatccattttgtttttggttgcattttaaagtaagctgtggccagccatggtggctcacacctgtaatcctagcactttgggaggctgaggcgggtggatcacctgaggtcaggggtttgagaccagccttgccaacatggtgaaaccccgtctctactaaaaatacaaaaattagctaggtgtggtgacgggtgcctataatcccagctgtacttggaaggctgaagcaggagaatcactggaactcgtgaggcagaggttgcagtgagctgagattacgccacttcactccagcctggacaggagcgaaactccatctcaaaaaataaatcaataaagtaagttgcaaagtttgcccctaaaaaacaaataatttactgtagctcaatgtttgtttatttttttcaagtttccaacaagtcattgattactttttaaaaagtaaaatttatatacaatacaatgcgtaaatcttaattgtgctatttgatgaattttgacagatgcatgtatctgctaactaatatccctatcagaattagaacattactgctattccagaaggtttcttcacaccctttcccagtcagtcttcacccatgctgcccagaggaaccattactccttttttcaccatagattaattttgcctattctagaatcccatgtaaacagaagcatatagtagagacacttttgtggaaagcttctttcagacagcatgttttttgagattcattcatgtcattgcatgtattcagttatttctttttattgctgagtagtatttgattgtgtgaatgtaccacagttttttcatttattctcctgttgatggacatctgagcggtttccatttttttggctactattaataaagctcctatgaacattctcgtgcaagtctttttgtggacatggcttgtatttctctaaggtcctaggaatagaaatgctggatcattaggtaggtagatatacatgtagtttttaagaaactacctgatattttccaaacttgttatatcattttatgtggccacgaaaaatgtatgggaatttcagttgctccatctcttcaccaatgtttggtgttatcagtcttttaatttttggctattctcttggcaagtgacacttgtgtattgaggacaaatgtaaaaataaataaataaaacttggctagtctcgtgggcatgtaatagtatcttgtacttttaatctgcatttccctgatgacttatgattttgaggatcttttcatgtgcttattagccatttatataacttcatttgtaaagtgtccagttattttgcccattttaaaattgtttgtatttttccttactgagttataggagttcctaacacattctgaatatcagtcattgttggatatgtgttttgcaaatattttcttctgtgtgaattacgttttttgtttgttttttttttttttttgagacgaagtctcgttctgttgcccaggctggagtgcagtggtacaatctcggcttgctgcaacctccacctcccgggttcaagcgattctcctgcctcagcctcctgagtggctgggattacaggcaggcgccaccacgcctaatttttttatttttaatagagacagggtttcaccatgttggtcagactggtctcgaacttctgaccttgtgatccacccgccttagcctcccaaagtgctgggattacaggcgtgatccaccgcacacggccctattttttttttttttttttttttacgcaatagtgtcttcagtcagcagaattttaaaaatttgatgaatatctatttttttcttctattgttactgctttgctgccctactaaacttttgcctatccccaagttgcaaagatattttcctgtgttttctgttttcttttcttctttttttttcttttgagatggagtctcactctgtcacccaagctggagttcagtggcatgatcttggctcactgcaccctctgcctcctgggttcaagtgatactcatgtctcagcctcctgagtagctgagattacagatgcatgccaccatgctcggctaaattttgtatttttagtagagatggggtttcactatgttggccaggctggtgtcaaactttactgacctcaagtaatctgcccgcctcagctcccaaagtgttgggattacaggcgtgaaccactgtgcccagccctgtgttttcttatagaagttttatgtttaggtctctgatccattgcaaattaatttttgtatatagtgtgagataaagcttaaggttcatttattttcccatctagatatccagttgttctggcgctatttgttgaaaagacaatttcccattggattgctttggttcatttgttgaaaatcagttgatagtgcaagtgtgggtcttttcagtgttctctattttgttgatatgcttgtctatttatgacagaatcatgctgtcttaattagtgtaatttcacattaagtctttttttttttgagacaaggtcttgttctgtcacccaggctggagtgcagtggcgccgtcagggctcactgcaacctccacctccagagctcaagctatactctcacctcggtcccccctgagcagctgggaccacaggcgtgtgccacyacactcagttacttttttttttttgaaatggagtcttgctctgtcacccaggctggagtgcagtggcacgatcttggctcactgcaacttctgcctcctgggctcaagcgattcttctgcctcagcctcccaagtagctgggactacaggtgtgcaccgccacgcctggctacatttttgtattttttgtagagatggggtttcactgtgttggccaggctggccttgaactcctcacctcaggtgatctacccgcctcagcctcccaaagtgctgggattacaggcatgagccactgcaccttgccaaattttttgtattttggtagagatggggtttcaccatgttgttcaggctggtctccaactcctgagctcaagtgatctgctggccttggcctcccaaagtgctgggattacaggtgtgagctaccatgcctggcctcacattaagtcttgaaattaggtaatgtaaattatccaaccttgtttctccaaattgcttggattttatagatcttttgcatttccatataaattttaaaattaagttttctgtttctacaacattcctggtaggaatatgaatgggattacattgactatgtgtgtaaatcaattagcaaagaaagtaaatcttattgaatctttcaatccatgaacattataaatatgtatatatacatatagatggatgttgaactttgtcaaattttttttttctgcatctatttggatgactatatgatttttgtcctttatctgttaatgtggtcattacattaattgttttttcaaacattaaaccaacattgcatttctggaataaatctcatttagtcatgatgtgttatcctttttatatactgctagattcaatttggtactattttgttgtaaatatttacatctttgttcatgaaggatattagcctataatatttttctttccttctctcttcctttttttctttttgtaatttctccagctttggtattgggttattttggcctcaagaaatattgaatattgtctcttctgttttctgaggttgtataagatgttatttctctaagtgtttgacataattcaccagtaaaactatcttggcatgggttttctttgtggggaggtttttgataacaaagtcaatttctctgatagacaaggggctgctgagattttctctttcatcttatctaagtcttcgtaaatgatgtattttaaggaatttgtctatttcttctaatttgtcaaacatattgagataaaattgtttataatagtcttttattatcattttaaggtctgtgggatcttaggtgatatcctcttttattcctcacctgggtgatggtctctgttctttttcttgacctgtctagctagaatattataaattgtgttgactttatcagtttcactgatcttttcaaagaaccaacttttggctttattaattttttctgttttttgcctgatttctacttcattgattgcaattctttatcatttctttccttttatttactctgggtttactctgctcttcttgatttttaatttaattctgctggggtcagagaacataccctatattattttgattcttttatttttattaaaatttattttatttcacaatatattctatcttggtgaacatgccatgtacacttggaaagaaagtgtattctggccttgctggatgtagtgttctataaatgttgattaggtcatgttggttgttagtgtttttcaaatcgtatacgttttcattgatattgttaagtgagaggagagtgttgaaatctccaattgtgattgtaatttagtccactttttcctttgattctgtcaatatgcttcacatagtttgaaacttgtttgacaaacatacatatttatgactgttgtttgtttgttccttatgaattaaccattttatttttagataaatgtccccctttatctctgataatattgtctttttccccttcagtcttttttttttttttttttgaggtggagtctctttctattgcctagactggaatgcagtggcacgatctcggctcactgcaacttccgcctccctggttcaagtgattctcttgcctcagcctcccaagtacctgggactacaggcacgtgccaccaggcctggataattttttctatttttagtagagacggggtttcaccatgttagccaggatggtcttgatctcttgacctcgtgatctgtctgcctcaacctcccaaagtgttgggattacaggtttgagccaccacgctcggctccccttcagtttttttttaatttttattttttttgagacagagtcttgctctgttgcccaggctggagtgcagtggcatgatctcggctcactgcattttccgccttctgggtttaagctattcttgtgcctcagcctcctgagtaactgggattacaggcacatgccaccacctccaggtaattttttgtattttcagtagagacagggtttcactatgtttgccaggctggtcctgaactcctgatctcaagtgatccacccacctcagcctcccaaagtcctggaattacaggcgtgagccatcatgcttggcctccccttcagttttattgaggtgtgattgacaaacaaaaaattattgccaaggccagttgtcaaagagctttcccctgtgttttcaactaggagttttatagtttcagatcttatgtttaagtttttcatccattttgagtagatttttatgtatggtttaataagggtccaacttcatattttttgaatagggatatccagttttcctaccaccatttattaaagaaactatcctttccctgttgtatcttcttggtacctttgttgaagatttgttgaccatataggtttgggtttctttctgggctttctattctgttccattggtttctatgtctgtttttatgccagtgccatactgctttgattactgtagttctatcatataatttggaatcaggaagtgtgatgcctccagctttgttcttctttctctagattgctttagctactcgggatcttttgttgtactattaatatacaaatgttaggggttttttttctattttttgtggaaaataccattggaattttgatagagattgcattgaatctgtagattacattggattgtgtaggtattttaacaatattcttccaatccatgaacacaggatatctttccatttatttgtgtcttcaattttttaatcaatgttttatagtttttcatattcagatatttcacctctttggttaaatttgttcctaaaactattttattacttttgatgttactgtaagtgggatttttatcttcattgttttcatgtagttcactgttagtatatagtaatgcaactgatttttgtgtgtttttttttatcctacaaatttgcagaatcatttattagttctaacagttcttttgtggagtctttagggtttcatatatattagatcatgccatctgcaaacagagtcaattttacttcctcttttctcatctggatagcttttatttctttttcttgcctgattgttctaactaggacttcatagttctagttttgttctatgttgaatagcactatgttctagttttgtactatgttgagtagaaatggcaaaactgaggaccgttgtcttgttcctgatcttaaaggaaaagcttttagcttttcaccattaagtatgatgtttagctgtgggcttgtcatatatggcctgtattatacgaaggtacattccttcaatacctaatttgttgaaagttttttatcaaaaaatgatgttaaattttgttgagtatttttcctgcatctcttgaggtgatcatatgatttttatccattattctgttattgtggtatgtcacatttattgatttgtatataatgaataattcttgcatctcagggataaatcgcacctgatcatggtgcatagtctttttaatgtgctactgaatttggtttactgaaattttgttgagggtttttgcatttatgttcatcagggatattggcactactaacatttcaagccagataattcttgtttgttggaggccttgtagaatatttagcagcctacctggcctacaccaccaaataccagtagtacctttccctacttctaacaacctaaaatgtctccagccagatgtcccctaaggggcaaaatcattttcagtcagaaccactgtttagcagtaacctgtaagacaaaagtataccaaaaagtagaagtaactttatggattcctagatcagtgtgttctgctatcactgtcttctaggctgccaggatttacgcttttaatagtgtagtctagtactaccttgccattatgttcagaagtaaatgtgaatttaagttgaatagtagtgttttaaaatatgtaatccaaatattcctaattttttattttattttgttttgtttttagggacagtcttattctgtcacccaggttggagtgcactggcatgatcatagctcactgagaccttaaactcttaggctcaagcagtcctcctgcctcagcctctcaagtagctgagactacaggcctgtgaagccatggcagctaattttttaatattttgaagagactgggtctcactatgttgcccaggctggtcatgaactcctggcctcaagcagtcctcctgcctgagcttcccaaagtgctgggattacaggcatgagccaccatgcttggcctccaaatattagtttaaatgaaagctgctttttctatttaaaattttaaagtgattggttttgaaaactttttaatgttttcatcattataggtgatatctatcataaggtatttttgaaccttgtttttattatactcataaaagtaatacattaaaacagataatggaatatgctctttttttcttcctaccaaaacattattctctaactagatttgtcacccagcttttagtgaattatgagttctcaatattttcatacacttttggaagacatggagatagggaagggggatggcaattcgagtgcataaaaatagtttttactttacatgttgtgactcacttaagtttcattattataataaatgttaaagatattccatctactttttatagtttctgaatcatttgctcaggtataatagttatttgatatgaataaatttgagaaaatattatttaaaatatactctgttacagaatcttcctgccattatttttttaaattaagttcattttattttattgatatataacattttacttatttaatggggtacatgtcatattttgttacatagaatgtgtaatgatcaagtcagggtatttggggtacccatcttgagtatttatcatttttatatgttgggaacatttcraattctctgttttagctgctttgaaatacataatacattgttgctaactatagttacctactctgctatgccttctatctaacagtatttttgtacccattgaccaatctctcttcatctctaccttcctcccaccccccaccataccctgcccagcctctggtatctatcatcctactttctacctccctgagatcaactttttaaaatttttattttttatatagttttttttatttcaataggttttggggaacaggtggtgtttggttacatgaataagatctttagtggtgatttctgagattttggtgcaccagtcacccaagcagtatacactatacccaatgtgtagtctttcttttttcttttttttgatacagagtttcactctcgttgcccaggctggagtgcaatgccgcgatctcggctcacctcatcctctgcctcctgggttcaagtgattgtcttgcctcaacctcccgagtaactgggattacaggcatgcgccaccacagctggctaatttcgtatttttagtagagatggggtttctccatgttggtcaggctggtctcaaactcctgacctcaggtgatccatccgccttggcctcccaaagtgctgggattacaggcgtgagccaccgtgcccggccccagtgtgtagtcttttatccctcaccccctattattactgaatgatgccattatcattatatagatacacagattcgcttctatatactaccattttttccagatatttcataataataatatgtgacctcactaaaatacccctgaatggaaagaaagtcatcatactagtagcattataggaattagaaaacaatgtgcggtttcattttctgatcatcaaggatctggaaatactgtttttctgtaatacgaagaaagcaagtatgtttctttgtatctatgtaaaatcatatcacttatagttaagaataggaagcctaaaatgtatgatttgtttcaatatggatccagaccagttcctggtaactttttaataggaggttcaggctgttctgctaaaaaaaaaaaaaaaaaacaaaaaaaaaaaaaaaaaaaaaacaaaacaaaaaaaaaactatatgtagcatttgatacttaattgtagtaagtactgtcaattctctcctccgtgtcctgtctcgtggcacttaacttgaccaatttatataaaaagaagactttcttctgaaagtagggagtatctcagttttacaaataagcaaacaaacatctggaattgaaataacttgcttaaggttgtggagtttatagcagcaaacctaggtcttttgactccaaagtctatgtttttttttccttcttatcaatgcgagagtacaaagtctattattacctatcattttgccgagaaaattagtatgattagaagggtaagctatgtgggaaagggatggatgtaaaaagttagttgtcgacagtatagggattgagttgaaagaataattagatctgttttctaactaataaatggtaaaaaaaaaaatgtgataggaaaaaacttaatgtgtgagagtttccagccttctgctcttcgtctatgtgctaatgatagttctacctttactaattcaattttttccttttctcctgtctccaacaagggctcagcatttgtcaaactagatctttggggatttgtaatatagacttgacttgagagagagggatgaggtggaaggaatatgaaagtggctgccacaggatcacaggataacctaattatcttgttttgttttgttttctttttttttttttttttttgaaatggagtctccctctattgcccaggttggagtgtagtggcgccatctcggctcactgcaacctccacctcctgggttcaagcgattctcctgcctcagcctccagagtagctgggactacaggtgcgtgccaccacgccctgctgtgtttttttttttgtatttttagtagatacagggttttaccatattggccaggctggtcttgaactcctgacctcgtgatccacctgcctcagccccccaaaggctgggattccaggtgtgagccaccatgcctggccttgttttgtgttttctacttcatactctgtcatggttgcattaaaaaaaattttagtagaggtcttcaaatcttacagtgaatgctgatacctcctaattgtagcagcattagaaaatgtcttatgataattgttgaacttggatacatgagatttaatatgttattctctttacttttgtgcatatttgatactttccataataaaatgatttttkggattttttaaaaagaaaatgttttagtgaacatacttgattgctaatttctttctttattcctggaatatcagaactatatcttgtatattactattgtgtatttcagggtgcctaacataatactcattcactaaataaacatctgagttgaaatgaatataatatttagttgcttaattttaaatgtaagttatacttaagtagcagttagtatataaagtgaaaaatgtggtttttggtgaattctataaaggtgagaaaatgttctggaattagataacggtggcggttgtgcaactctgtgactatactaaacaccattgaattatatactttaaaaaagtaagctgtgtagtatatgaatgacatatcaatttttaaaaaggcaatgtaaaaaaatacaaagataagtcataaactgggagaagatacttataacacaaataactcataaaagaactctcacaaatggataaggaaaagacagccctatagataagcagacaaataaaactaatggacatttcacaaagagaaaacacgaataggcaagaaacattttaaaaggtacttaacctcatttgagataaagagatgcaaattataacctcaatgaaataagcatttacacataccagacttacagaaattaaagaattggatcatcccaggtaggcaaaatgtaaaggaacgtgaaccctcatatactgctagtaagattctttaactggtacaaccactttggaaagatgttttggtattacctggtaaaactgaagttgcaaatgccctttgaccaagcagttctactactagcagtgcgtatgtgtgtttatatgtgtatgtaatctgtcctttccctactgattgttaatatcacatttatcaagttatcatattttcatgggtctatttctaggctctctagtatgttaaattggtgatttgtttatccatgcagcaattttatgctggcttatttactataattttaaaataagttttaatgcctagtaggatcatcttctttcagaatgttcttcagggatgtttggctatttctggtcatttgctcttccatataacccttaggatcaatttgtcaagtcttatgtcttgttgggattgttattgaaattatattgaattactttgaattgataggtcattttgaaaataattttctggactgtatttctccatttatttaggtctgtcttaatgtctttaatttaattttacaattttctttataaacttatcatagtcttttgttatatttcttcctatgtatttatgtgtacgtgtgtctgtgtgtttgtgagacagagagagggagggaggaaagggggagtggaaggaggagagagaaaaagagtataaaattaaacatcaactaaaaaaacagctttattgaggtacaatttacataccataaaatttactcattttatgtgtacagttcagtgatttttagtaaatcttcagagttgtgcaatgatcactacaatctaattttagaacatttctgtcaccctaaaaagaaagcttgtgccagtcactcttggcacacttgttggcagtcactccttgttcccatccctagcccgaggaaaccaccatgtagtttaaaaaaaaaaacttattttaagcctttttagtatgaacacttaaaaatacacaaagttgacaaaatagaacaatgactctcaaacaaccaataaggacaatcttctaacttctcacctggattgttttaaaacaagtctcatttcttctataagtatgtcagtatgtgtctccaaggtatgatgatttcttcttaaattgaagtataattttagtttcattatcacacctaaaaagattaacaattttttttttaagagatagggacttgctctgtcactcaggctgtaagtgcagtggtgagatcatagcttactgcagccttgaatttctgggctcaagcctgcttcagcttcctgagtagctagaactacaggtgcgaactaccatatctagctaattaaaaaaaawttttttaatggagaagggtcttactatattgcccaggctggtcttgaactcctggcctcaagcgatcctcccaccttagcctcccaaagtgttgggattacaagtgtgaaccactgtacctggccaaattaacaaaattttttttttgagatagggtcttactgtgttgcccaggtgggagtgcagtggcgcggcttaactgcagccttacctcccagactcaatcctcccacttcagcctcccaaggtagctaagactatagacatgctccacaaggctgggctaatttttgtttattttttttgcccagggtcttactatgtttcccagactggtctcaaactcctgggctcaagcagccctgtagctcggccttccaaagtgctgggattacaggcatgagccactgtgcccagcccccctcatttttttcattgccacttatctgttgaagaaaccagatcatttgttggtagactttcttacattctggacttggctaattgcattcttgtgatatcatgtaatatgcttttatatcatatcttctgtaaaaaggtaattagttctagagcagcacatgctgtgcccttagaaatacaaattacaaatgcaagccacataatttaaaattttctggtagctgcattaacaaaagtaaaaagaaaaaggtgaagttatcttaatgacacattttgttcataccagatattaaaaatattattttaccacgtaatgtacataattattagtaagatattttacagtctttttttgtaccaaatctttgaaatctgttgtgtattttacatttgcaacatttctcaattcaaagtagctacatttcaggtgcttagtagctacgtgtggatagcacagatctagaggtctgattttaggcttgagtttttgtcaagaataattcatatgtggtgctgtgtacttttttgttttttttttctgagacggagtctcactctgtcaccaggctggagtgcagtggtgcgatctcagctcactgcaacctccgcctctgggttcaagtgattctcctgcctcagcctcccgagtagctgggattacaggcacgcgccaccatgcccagctaatttttgtatttgtagtagagacagggtttcaccatgttggtcaggatggtctcaatctcctgaccttgtgatccacctgcctcagcctcccaaagtgctgggattacaggcatgagccactgcgcccggccgctgtgtactttacattgcatttcaacaggaagcaaataatatatatatatttttgtgatgttaagattggtccaaaagttcaagtgccgtcagcctaatcattcagtacctgctgccccagcctttcaccttatggttttagctgcctttgatgatctttgcctagatttatatttcattagtgattcacaatagtgactgtgtaattctttcatttcttctgcatctaatagttgaactgttctataaagaaaaattttctctcatcagttgttcttctactgaagtatttttctgtcgtagttattctttttattatgaattgttatggcccactatatggtcggttttctgttcttttcttttttttgagacagagccttactctctcacccaggctggagtacagtggcacaatcttggctctgtgcarcttccacctcccgggttcaagcgattctcctgcttcagcctcccgagtaggtgggattacaggcacgcgctactatgcctggaaaatttttgtatttttggtagagacggggtttcgccatgttgaccaggctggtctcgaattcctgacctcaagtgatccacccgccttggcctcccaaaatgctgggattacaggtgtgagtcacctcacccagccttgttttgtgaatttggattgtgcatttttatgttcactgatactgtatctcaagatgattttcatattttagctagcatttttaggtgacatgttgaaaggtattcagggtaaattagtgttctatttatctggaatggacggtgttaaatattaatatttttatttaattcattagggaaaaatgggtgaactaatatatctgtaataccataaaayaggactctgccttttaacgcagaaaatttggaatttatcctttgcactattgtctcaaaagtgacaatcttcttggcaaccaaattgcattacatcttcaatatctgttattaatttgtatgcattgcgcaatctgaacagaagtggtagaaaaaaattgagacttttttcttttgtattgttaactgttatgttaaactgtaggcatctatgtgactgtgaagtatctttttacctgtctcaataaaatgttactaattattctttaacaggtacaaagtgaattaatttgtgctgtttttcttttttttttgagacagagtctcactcagtcgccaggccggaatatggtggtgcgatctcagccctctgcaacctccacctcccggggtcaagcaattctcctgcctcagcctcccgagtagctgggactataggcgtgtgccaccatgcccagataatttttgtatttttagtagagacagggtttcaccatgttgatcaggatggtctcgatctcttgacctcgtgatccatccaccttggcctcccaaagtgctgggattacaggtgtgagacactgctcccggccaatttatgctgtttttctaatggtaattttgtgtttgcagttcatatccttagctagaaaagaaaaaaaatatataagaccttgctcattaaatcctgaaagataaggaactaaaaataaacacaggacagatgtctcagaattccattttttttttaattctctaataagaatagggatttctaattagccaggtgtggtggcaggcgcctgtagtcccagctaccagggaggctgaggcaggagaaaggcatgaacctgggaggtggagcttgtaacgagcccacattgcgccactgaactcccacctgggcgacagagcaagactctgtttcaaaaaaaaaaaaaaaaaaaaaaaaagaatagggagttctaatatagtctgttcaacaactgtataatagaatccatagcaggagatatgtttgatagtagttctgtcataagaaaatggtaggagattgaagtcgttgcacatcattttagtccaaatgtcatctgatcacctgaggtgcctagaagtatttactttcttacattgtttgagggatatatttttgttttaaccatgaatagcacacactgttttattttatttatttatttttttgagatggagtcctgctctgtcgcccgtgttggggcatgatcttggttcactgcaacctcctcctcctgggttcaagcaattctcctgtctcagcctcctgagtagctgggattacaggcacacaccaccatgcccagctaattttttgttttttgtttttgttttttagtagagatcgggttttgccatgttggccaggctggtcttgaactcctgacctcaagtgatccacccgcctcagcctcccaaagtgctgggattacaggcatgagccaccgtgcccagccacacacttttttatttggtagatttcctcaagtcttttcagaagcaagtgaaatacaaatcatgaaaaatgaaaaagaatattattcttcctcccttcaatctctgtggctcagtcttaaggcccaaacagtgatacatgtttgttttatggcagtagtcataataatttgtgatgtggcagtgagagatgagggaaatattttgaatcactgcctacaagatatgatgttcattattgttctcaagttatttcatatgtttattctttctcccctaaagaaaacccaggatcttttatggcaggcactgtcttctacttttatgtatctctatcctctttttgtcagacttcaggcccatataaatttccagcttgtttaaaacatttttgccttggctaccttgtacaatgggatctttttagcctctttcttrtgaaaacctcataccttggaatttctcttactattgatagaaaaattatgcacatggtagagaaaagctcaatctaacttgtcttcataggacttccatatttagggaaagaccctaagatgtcgtgctggatcatttgctttttgatatatccagattgctccttatcccaatgaaaacagataaaggaggttgtactgtaattagctaattctgtaattcttgccaagatagtaggggttgttcattgtgaacacattctgccacaacagctgaggtagaacattgtgtttatttgtgagagaatttgagtatgaacaatttggtttaaagattaaatgggggaataaattatattgataaaactgatgaaatattttattaaaaattactaagttacacagaggagtttacatttaaagcattaaatatactgaacattgtagaaattgaaaattctgtctgtatttcatttggaagagtttctggctttcctcttgcctttttgagaagtagacatatgtactggaggcaacctagcttggtgtgatgagcaacagattggaacacagagcagcactaggtgtacagtgtcaggaagtccaactcagtgggtgtttgttatgcacaaggaactttgacaggcattattgtgggagagggtggttgaggtggatataagcatgaataagaaatagtcccctaaataatgtaaaataataatgtaatggaaatggaattagataagtaaataatagaaaatagaatgaaacatgttaaacagagtttccaataacatgctaaagaagaacacaggaaaaagcagtgaatattgattaggaaatcagagaagatgtcattaagaatatagcttctaagttgattctagaaaaagagtagtattttgttagatggaagatgggaataggagtgtgaagatctctttttggaggaactggtaaatatggaggcatgcattgccaagacaccaattttattgaaggataaaggagaacataaggtcaaactatcagtgtttaatatttactctgtaataattaacatttctgtaatatttttatatacacatttgagacttctaacaacagccaagggagctatgtattactaccccaatatatacatggtcctgtgtaatttaatggaaggctctggatttgaaggctaactttgtcacttaaaagctatgtgaccttgagtattatttgatattactgaatctcagttttctcatctaccagatacagataataccttttcagtaaatcacttcagggctgctgcatagactgtacagtgcattattccaggggtggtgttcacacagaccaggggttgacaatgttttttttctgtaaagagccagatagaaaatattttaggctttgctggccataaaccataagaaagctgtcacaccaactcaaccttgctgttatagcacaaaaacagccatagrcaatatgtaaacaaatgggtatagctgtattctaataaaacttcatttataaaaatagattctgggccagatttggcccacagtttgaagtttgctgactacataggccaggatgtgaatggtgaaccctttagttgtgcaattctgtgatacaggttgttttaaggaataaattacttatagcacagaaatatttctagcttagtacatgtgaatcctcaacgataaaagtctatatacttttctttctttcctttttaaagttattgccattgaattcttgggtaaaccacttaaacttttgccctctatttacttcagaattctcagtagggaaataaaaactatcttttaccagattaactttaattaggtgtatgagttagagtgataataggtgactgttgttttgaattccttaaagtcaatgttaactagaaattataagacattattatagctgaatgccattgtgttagcagtcttaactacaacataacagggaacctgaagcctaaactaatggcactatttggtgtcttatgtgatttgctastatttgtaaactaaaatttttacctggagaatatttattgttttggatttcagcataattagcatatggtcctgattttggtacccacgacatagtttttgtcagactgtcattgcatcattcttgaaatatagctaataattgaaaagaaagagtatgcgttcttttagagwtacctagaaagagtggggaggatgtgaactttcttttgctcttacttattatagctctgttaatgctgttcctttcaaagaatattttctaaggtgtttttccctcggtgctttgaaaagttttcatatcagattatgtaaatcaaatgtcgattatgtactagagctgattttgacattgcttttgagtcttagtttaggaataacaaactaattgcaagttttaggatattatatgctaatcattattgtgagaagattatgatgttgaattgccatacataattctgttttcccactcttaatgataagagagattttttatagttgtcattttaactgtggaataaagggtttcctattttcatatttgaaaatatttccttccccttactccatatagaactatcacgtacattctacctgcattatgataaaaaatattgataaaataaaaatattgatacaataaaaaattttaatcataatgcagatagaatgtgtataatatttctttttttttgtttttttggagtcggagtcttgctctgttgcccaggctggagtgcagtagcatgatctcagttcactgcaacctccgcctcctgggttcaagcagttctcctgcctcagcctcctgagtagctgggactacaggtgcgtgccaccacgcccagctaatttttgtatttttagtagagttggggttttaccatattggccaggctggtctcaaactcctgaccttgtgatccgcctgccttggcctcccaaagtgctgggattacaggtgtgagccactacacccagcctgtatgtaatatttctatatggagtaaagagaaggaaatactttcaaatatgaaaacataaaatatatataacataaaatttattattataatcatttttgagcatacaattcagtgacattaggtacactcacaatgttgtgtaatcatcaccaccatccatctccaaaactttttcatcagcccaaatcagacttcatacccattaaacaataactttccatttyttccttcccccatcccctgccatcccctagtaacctctattctacttttcatgtctatgaattgcctatttttggtctaggtactgcatgtaagtgtaatcatataatatttgtccttgtgtgcctgtcttatttcacatagcataatgttttcaaggttcatgcatgttgtagcatgtatmakaatataaatatatatatatatatatatatattttttttttttttttttgagacagggtcttactctgtcagccaggttggagtgcagtggcgygatctcagctcaccgcaacctccacctcccaggcccgagtgatcctcccacctcagcctcctgagtagctgggcctatggcgcatgaccaccatgcctggctaatttttttgtatttctggtagaggattttgccatgttgcccaggctgggctgaaacccctgagtggaagccatctgcttgccttggcctcccaaagtgctgggattataggtgcgagccaccatgcctagcctcagaatctcatttttaaattactgaataatttcaattgtatgtctataccacatttgatttatccatttatctgttgaaggacacttggacattttcacctttttgactattgtgaataatgccgctgtagaaattggtatacaaagtatctgttgagtccctgcttacagttcttttgggtrtatgcctaggagtggaattgccggatcatatggtaattctatgtctaatcgtttgaggaactgccaaacgttttcacagtggcatgcattgtgctttaacagatagtttgggaagcctttttattaccttatatttaaaatgtttactgtttcattttaaaataagaaaatgttttggaatttcataaattgttatcatttgggggtaataacatttctatatttgcctttttagtactttttaatttttccaaatttgaaatattaaatactgatttctttgacatacattcactgagaagttaaaaagatccttgcattcagcaagtgaaacatgctgtaaataaatcatgttacttctctattaacagttaacactagggactcccaagcattctgaaacttgtatgataacaaaacactagattttccttatgtcctagaaaatgcttgcatttctcaaaaagaatacactctagtttttttttttttgagacagagtcttgctctgtcgcccaggctcgagtgcagtggcacgatctccgctcactgcaagctccgcctcctgggttcacgccattctcctgcctcagcctcccgagtagctgggactacaggcgtccgccaccacgcccggttaattttttgtatttttagtagagacggtgtttcaccgtggtcttgatctcctgacctcgtgatccacccgcctcggcctcccaaagtgctgggattacagacgtgagccaccgcgcccggcccactctagtttttttctaaagttaaatctgtactgtctctagttcattatgggtaccttacttgaaaagtaaacaatattaaacaggaaaaaaatgagacagtacttaatagcagttaagcattatggagtatttactgtatgccagaccccatgctaagtaagcacattaatttaacctcacagcaatgcatactgggtgggagctctcattgtctttatttaacaagtacaaaacttgaggcacacaacagaggtttaacagagaggttaaataagttgtctrtggtcacacaagtaacaagtagtagatttatatttaattcagaacatctttatctacaagcatattttaggactacatgttggcactgatgaaaataataaatagatctttatccctatcttttggagtttacagtaaagatgagcccaaaacacttaatattactgttgtaagggcatagctaaaaaatggtaattggaccttaattatagagatttgagggctacttattcccatatataagctttacttagtgtaaacttttgatatagaccccaagttcattatttgcttggtatttcaggtactggcaacccatatatgagccaatgataattagatcacctagatcttggtttaaatttattactgacaccacatccttctcgttctttattatttttgagtgcttctctacctccttgaaatgctcttgctttctggaaaaatctctttatgtaaactccttaagggcaagagtctgtgatagtgcttggtacataattagtactcaacacgtatttgctgaatagccaggtgcagtggcacgtgctggtagctgcaactaagtcaggaagctaaggtggaaggatcacctgaggtcagacatttcaggctgcagtgctgtatgatagtgatgtgaatagccactacactccagcctggacaacatgggctccgtggctaaaataagaacaaattttgataaatacrtatattgtttctctttataaatctttatcaaataagatgatgaaatccaaaattgtaactgttattatggtggttgatctctgccccccaattttccacagccgtatttctatttatttatttttttggagacagtctcactctgtcacccaggctggagtgcagtggtgcaatctcggctcactgcaatctctgcatcccatgttcaagtgattctcctgcctaagcctctcgtgtagctgggattataggcacgcgccaccacgccaggctaattctttttgtatttttagtagacacggggtttcgccatgtaggccaggctggtcttgaacgcctgacctcaagtgatccacctgcttcagcctctcataatgctgggattacaagcgtgagccactgtggccggcccgccatagccatatttctaattacrttttttgtttcttgaatayacaagaagtactataactgtattaatctatgcttgcattgctataaagaaatacctgagactgggtaatttataaacaaaagaggtttaattggcttacggttctgtaggctgtacaggtagtatagtggcttctgcttctggggaggcctcaggaaatgtacaatcatggtggaaggcaaaggggagtaaggcttctggcgtggtgcaagtaagagagagggcaggagggaggtgctacrtgcttttaaaggacatgttggggccaggtgcagtggctcatacctgtaatcgcagcactttgggagacagaggtgggtggatcacctgatgtcaggagtttgagaccagcctggccaacatggtgaaaccctgtctctactaaaactacaaaaattatctgggtttggtggtgggcacccgtaatcccagctacttgggagtctgaggcaggagaacggcttcaatctgggaggcagaggttgcagtgagccgagatggcaccactgcactccagcctgggagacaaagccagactccatttcaaacaaaaaataaataaataaataagataaataaataaaggacatgtcttaagcgagccctcactcactagtgtgaggagagaaccagggggatggtgctaaaccattcataaaaatccacccccatgatccagtcacctcccaccaggccccacctccaacattggggattacaattggacatgagatttgggtggggacagagttccaaacctatcaataacaatgataaacggcatgaatttttatatcagacagacctggaattgatcctggctccacttactaattttgtgtgaccttgggcaaggtacgaaacctctccaacctccagtttctcctcaggaaaatgcagctgataatagtgctatctcacaggattgctgccaggattaaagaagataataataatacatgtgatgtgctaagycatgttcaggacccattaatgtacaatgaatttttggttttttggtttcaaattagttgagattcaactgtaaaagacgtggttgaagtcctaaaggagtgtgcttattggacctacaaataggagatatgtgtataaatgactttaaaacactgacagactatatgaataagttaaaatgaataaggtagagactgaatatacatcaatgactattatttcattatagggtccaaatggtgctagaagctcaacaaaattattgtccatgtgctgttatcttatttagatatacaaacaatttaaaataaatgtatttaaattatatcataaataaaataaattacttgtgggagtgagtcataattaatgattatagtagcaatggtcctactaattttagacaaacagattgctgtgctatatgaacaactaactatgaagactaaatagataccaaattctgttataataaagtaaaacataacttgatctgaaacatttaatcatgggcttaattccaattataatgtatgatgtttaaagtataagtgataagttgttcacataagtgattattattatatataattaatattataaaccttcagcttagctttgtatttttgtttgtttgtttgtttgtttgtttttggtttttggagatggagtctcgctttgtcacccaggctggagtgcagtggtgcaatcttggctcactgcaagctctgcctcccgggttcacgccattctcctgcctcagcctcctgagtagctgggactacaggcgcccgccaacacgcctggctaattttttgtatttttagtagagacggggtttcaccgtgttagccaggatggtctcgatctcctgaccttctgatccgcccgtctcggcctcccaaagtgctgggattacaggcgtgagccaccgcgcccggccagctttgtatttttctaattatctggagaggagataggagtttactagaaaaagaagaaagttttttcatttcaatatgaagattcctacattcaagccccttttccaataggcgccactcagagatcagaataatgacacattctttggtatagatacacacactctgggtgtttaagttagcttacggcagggcaggaacttgcccgatataatagaaagaattcctttgattgagaagcggatactggttagcaaggaccttggaaaactagtagaagagatggaaatagagtaataaccgaagtcttctttaacaatgaagaaacttattttgagactccaggggttggagaaagggttttcctgggctttagaactccattgttatttggtaaaggctgggaggggagtgggctgaaagtatgaaaactgtcctttcccaaatttctcccccatcttgtctaaaatgaccaattattcaacgcttatgcagcttttagtataaactagtttagtcaactagcttttctaataactaactgagatatatcaaggtaatgagattttgaaaggcgatcaaggaaaaagcaaaatatcrttttaaagcataagttgttgatgaacacaaagctttaagtgggagctggcagcttcaggaaggaatctggcaggaagaagaccaagatagcccagagagtgatgaggattactaaaacaagagatggaaagaagaatgtagtaaaggagttgagcaagtaacaacagcaaaaaaagtgaaaagagaccaaagaaaaggwggcactgaagcatagcattgaatgaagtacatatgcaactaggagcaagcattataaaatatgagcagcagtgtgggttgtttacttagaagtaaagttgctaagtctgaatttatttttatttatttatttatttatttatttatttatttatttatttatttattttttgacgagtcccaagtatctttctccaaaacaagagggaataccagctgacttctgattctgttataggttaagctgataattatggttagaacctctaggtgtttgctatattgttagctagtaggaagaatgttggaagattggagccagtttcaattgcccatctgttctggtcttatactaggattaagtgtttactaaaaatagaacggggtaacattgccaaacgtgtagcccataggcatttgtaaacttgctctcttattaarataattcatgctttaaacactggttggccatgaattgaagatgtaaagatgaggatttaataggtagtttttttctggaatagatgatatgctttttttctgtggggaaattctaattacaacaagcataggtttaagcctctggctgataattaaagttatgctatcagtcaggtcttaccgtactgccagtacttgctgttggagagagaatagattgtaatagattctgttgttcagggtctgtgacaactgaagcctgccaaagtcagttgcgccattctctcctctttgtcatatgtaagtgaggcagcaaagtattgtgaaaaaaatatgtcaagagagctgacttatacgatgattattgctcttcttgtttgacctggggcaagcccttctgagcattttttttttaattttcaaaatgaaaataatacctattttatccaagtggaagcattattgtagagtcagacattatagtgtatgtaagcactttttaaactataaagacaacgtataaaaatgaggttttcatttctatcacctaagaattgtttctagtttaagagaggctgaaatggtcatatttctgtcatgtaggcatttctcataaatttttcaaggaatggaatgggcaggaaaggaactatgaaagtaatggaaaagaatcatgtgggtatttgcatgaaagacagacttacttgaaattctaggcacaggaatgrtttctcaggattgtgataacgctgttctctgaaagatttaggtgaaaaggcaaagaccttatttatgattagatatgttttatatcaaaatatgacagtaatgaatataggagaatgaatcttatgcatctrtagttactctttgaaaataacattgctggctgctatctgaatcacctgttgttcagttattttttttcccttaggaaattgtgttttgtatatttttaaattattgtaaaatgtctgcaaaattaatctgcaccacaggaaagataaaaaataaagaaaaacatctgcaaaattaagcattgattagattaaatatggacgaggtgcagaatttaaatttatttatttatttattttttgagacagagtcttgctctgttgcccaggctggagtgcagtggctcgatctcagctcactgcaagctctgcctcccaggttcacaccattctcctgcctcagcctcccgagtagctggaactacaggtacccgccaccacacccggctaattttttgtatttttagtagagacagggtttcaccacgttagccaggatgatctcaatctcctgacctcgtgatctgcctgcctcagcctcccaaagtgctggaattacaggtgtgaggcaccgtgcccggcctgcaaaatttaaatttaatacaaatttaatggactatccccaaatatatggatgtgtagaatattatatatgtttttaaaacatgagttagagaaagggttggagaaagggtttgaaaggagatgagcacaaagatgaatatctccaattcaaggtagaaaatgtacataacaattatcagtcaatacatttatttatatataatttaaaactttttttctcatagaaaaaatctgtaggttgtcctaaatatagcagtcttaatctaaataatctattgaaccaatactttctgagactttacataggcacagatcctatccgagaagctgctaatcaactgctacactgctgcaggataaaccttttatttttataattttgtgtactcaaaagcttatatcagtgaagatagatatttcttcaatctaattactattagttattttaatggaatcaatcactttgaaaagaggattcaggtgtaaaagctttattctacttttattaatgaatttaggttgctttagctgctaataatgctgttgtttgcttctttctgttgtttttttttttttgagacggagtctcgctcgtcgcccaggctggagtgcagtggcgtgatctcagctcactgcaagctccgtctcccgggttcacaccattctctggcctcaggctcccgagtagctgggactacaggtgcccgtcaccacgcctggctaattttttgtattttttgtatttttttttttttttcagtagtgacagagtttcaccgtgttagccaggatggtctcaatctcctgacctcgtgatccgcccgcctcggcctcccaaagtgctaggattacaggtgtgagccactgcgcccagcctgcttctttgtgttttatcttgcattgtattactgtggagagaagcaattcatttaaaatatctggctgatgcaaaggcataagaaggacacaatggactttggaaacttggggggaagagtgggagtggggcgagggataaaagactacaaatatggagcagtgtatactgctcgggtgatgagtgcatcaaaatctcccaaatcaccactaaagaacttactcatgtaaccaaataccacctgtacctcaataacttacagaaaactaaaataaaaaaaagaaaggcttgaactattgattctcacacacacactcacacacacacacacacacacacacacacacacacacacaaaaataaatagaatgaaatatctggctgagtgtagtggctcatgcctgtaatcccagcactttggaaggctgagacaggaggatcttttgagcccaggagtttgagaccagcctcggcaatattagtgagactgtctctacaaaaaattaaaaacaaacaaaaacttctgaataaaatatctaagcgtttttcaattcagaaaaaacttaacagtttagaaagctttgtgttaacattggtgttttttttttcaggaaacaaatgaaaacgtattttttttattctctgttgttttttgttgttgttgttgttgtttggaaacagagtctcactttgttgccctggctgtggtgcaatcttggctcactgcaaccttcacctcctgggttcaagcccagcctcagtctgattctctagcctcagcctcccaagtagctgggattacaggcacccaccaccatgctcggttaatttttgtattttaagtagagacttggtttcaccatgttggccaggctggtctcaaactcctgacctcaagtgatccacccaccatggcctcccaaattgatgggattacaggcatgagccaccgcacgcagccccattctctaccttattctatatagttttactacattttaatatttttagatataaatgtagaaattatagttttagttttaatggttcctgacatttttttttaagtttattcagagcaaatgaaaactgcttttaggccaggcatggtggcttatgcctgtaatcccagcactttgggaggctgagtgaggcggatcacctgaggtccgaagttcgagaccagcccagccaacatggtgaaaccccgtctctactaaaaatacaaaaattagctggatgtggtggtgggcagcgggcacctgtaatcccagctacttgggaggctgaggcagggagaattgcttgaacctaggaggcagaggttgcagtgagccgagatggctccactgcactccagcctggcagcctgggcaacagagacagactcgatctcaaaaaaaaaaaaaaaagaaaagaaagaaagcggctttgatgttttatattatgaaagaaatttagctggacagatccagctgttgcatttataaatagctacagatatctacagcaataaagggtttattcaggttgttatggcaactaaaattcagcagaacttcaaagataaactatattgaagcaagaggtacattaactgtacatttaatcaaattatacaataaaattgttgcttaatatatcattttagatagcaagaaattagtttaacatatcaatgtaacttactatttttaatgtacaaatattttgtttttactcttttattttttttagatggaacctggctctgtcgcccaggctagagtgcagtgccacgatcttggctcactgcaacctctgcctcccaggttcaagcgatttttctgcctcaccctcctttgtagctgggaatacaggtgcatgccacctcacctggctaattttttttttgtatttttagtagagacggggtttcactgtgttagccaggatggtctcgatcccctgaccttgtgatccgccctcctcagcctcccaaagtgctgggattacaggtgtgatgtacaaaaattttgttcctaatttatctgtatgggttttatatacttttaaggagctttacttataggaatgatggatcatgctgacccatttaaaactctctttctcggtcttctttgtaataagttgcatgcttatttagatctgctggctagggttgagggtacatttctgagtcagtggaatatataaaagcctgcattcagctttaagtccatgatcttttttttttttttttttttgagacagagtcttgctctgtcacccaggctggagtgcaatgccacgatcttggtttactgcaatctccgcctcctgggttcaagcgattctcctgccgcagcctcccaagtagctgtgattataggtgcccgccaccatgcccagctaattttttgtatttttagtagagacagggtttcgccatgttggccgggctggtctcctgacctctggtgatcacctgccttggcctcccaaagtgctgggattacaggcatgagccaccacaccaagtgctgggattacaagcatgagccactacacctggccaaaatccatgatcttataccaatgttttatccaacttaactacctggttataatcttttaagnnnnnnnnnnnnnnnnnnnnnnnnnnnnnnnnnnnnnnnnnnnnnnnnnnnnnnnnnnnnnnnnnnnnnnnnnnnnnnnnnnnnnnnnnnnnnnnnnnnnnnnnnnnnnnnnnnnnnnnnnnnnnnnnnnnnnnnnnnnnnnnnnnnnnnnnnnnnnnnnnnnnnnnatcctggctaacatggtgaaaccctgtctctactaaaaatacaaaaaattagccaggcgtggtggcgcgcgcctgtagtcccagctacttgggaggctgaggcaggagaatggcgtgaacccgggaggcggagcttgcagtgagccaagatcgtgccagtgcactccaacctgggcgacagagcgagactccatctcaaaaaaaaaaaaaaaataataataataataataattggccaggcaaggtggctcacgcctgtaaccccagcactttgggaggttgaggtgggcagatcacccgwggtcaggagttcgagaccagcttggccaacatggtgaaaccccgtgtctactaaaaatacaaaaattagccaggcgtgatggcaggtgcctgtaatctcagcttctagggaggctgaggcaggagaatcacttgaacctrggaggcagagattgcagtgagctgagatcacgccactgtactccagcctgggcaatacagtctcaatctcaaatagtaataataataatttttatttttattcaatgtaatatgtgtataatttttaaaagtgaatagtgtactgtaaagcatatactaagaacagtctcttacccttttcttcttcattctcaagtcctccttggaaacaactattttaattttcttttctttctttttctctctcttcctctcttttctctttctatacattggaaccacaatggcaaaggaagcaactatttttaattctttttgtttgtttgtttgtttttttragatggagtttcactcttgtttcccaggctggagtgcaatgccgcgatctcgcctcaccacaacctctgcctcctaggttcaagtgattctcctgcctcagcctcccgagtagctgggattacaggcatgcaccactacgccaggctaattttgtatttttaatagagacagggtttctccatgttggtcaggctggtctcgacctcctgacctctggtgatcctcctgtcttggcctcccaaagttctgggattacaggcatgagccactgtgcctggcctatttttagttctttgtttcttctgggatttacctgtctctaaagaatgtttcatttgctgtttcttgttttttaaattatagacagtaactctttgttttttattctagaagataaagatttaacaatyttatacaactcctgctaccacttactttcccccactaactcccagtataatcataccacaacttcaggcaaaataatgtttacattgtttgaattatgtatatattgtttacaactgagccactatatactgtgtttacattttcttttcttttttctttttttttgagacggagtttcactctagttgccccggctggagtgcaatggcgcaatctcagctcactgcaacctccgcctcccgggttcaagcgattctcctgcctcagtctcctgagtagctgggattacaggcatgcgccaccatgcctggctaattttgtatattcagtagagacggggtttctccatgttggtcaggctggtctcaaactcccaacctcaggtgatccgtctgcctcggcctcccaaactgctgagattacaggcgtgagccaccgtgcctggcccgtgtttacgttttctttattgtataaccttttgtttttcctggagttaataatttactatttttcatttgtttagttttctatgtacctattgtcctttattttctgaactctgcagtagaaacataaaaaccactatcagtatagttaaacatcctgggtaatcattttttataaggctttcatcttggaactttgcatctgcctgttccagtccagactgtacgtgctgtataccttctgtacagctgacattctggagctctaccatgatcctcgtggttcctgatgcttctttttcatcagagcctcagttttgtggttttcatttctttctgggtttcttttctcattttgctggtggacatcctttactagtctttttataaaagattcatggttagaaagcaggattagtgagcttaaaaaaacaaataaaagattcatggaagttaatttttttcagatatttcagttaattttgttaacctgaaatatctttattccactcctccacttgattgttagcctagttgggtacagaattacaggttaaaggccaagcgtggtgggtcatgcctataatcccaataccttgggaggccaaggcaggtgaattgcttaagacccagagtttgaggacagcctggtcaacatagtaagaccctgtctctagaagaaaaattagccaggcatggtggcccatgcctgtagtcctagctacttgggaggctaaggtaggaggatcacttgagcccaggagtttgaggctgcaatgaactctgattggatcactgcactccagcctggaaatcagagcaagacactgtctctctaaaaaaacaaaaaacaaaacgaacaacaaaaaaattgttagaaaattgttttcccacagaattttgaaggcattagtctgttgtccctcagctttcactgttgttgttgttgttgttattattattattattattattattattatttgagatggagtctcgctctgtcatccaggctgtagcgcagtggcgcagtctyggctcactgcaagcttcgcctcccaggttcacgccattctcctgcctcagcctcccgagtagctgggactacaggcacccaccaccatgcccggctgatttttgtatttttagtagagacggggtttcaccatgttagccaggatggtctcaatctcgtgaccttgtgatccgcccacctcggtctcccaaagtgctgggattacaggtgtgaaccactgcgcccagccttcagtgttattattgagaaagatgatagcattctgattcctgaacctatttgtatgtggtttactttatttttttttattttttattattattttttgagacggagtctcactctgttgcccaggctggagtgcagtggcatgatcttggctcactgcaacctctgcctctgggttcaagcaatactcctgcctcagtctcccaagtacctagaactataagcgtgtgccaccatgcctggctgatttttgtattttttgtagaggcagggtttcaccatgttggccaggctggtctcaaactcttatcctcaagtgatccacccgccttggcctcccaaagtgcttctattacaggcgtgagccaccctacctgacctgtatgtgacttactttatcttttttttttttttcgtttttttgagatggagtctcactctaatcacccaggctggagtgcagtagcacaatctcagctcactgcaacctccgcctcctgggttcaagtgattctcctgcctcagcctcccaagtagctgggattacaggcacgtgccaccacacccagctaattttttgtatttttagtagagatggggtttcactgtgttagccaggatggtcttgatttcctgaccttgtaatcgtccaccttggtctcccaaaatgctaggattacaggcgtgagccactgcagacttaaaactttatcttaaagcttttagactcttctctttagccagcattttgggaactgagtaagggaatacacttgtttatatgtaacttttcacatagtattcttaattttagtaaggtgatttacttcagtctctcagtatataccttgtgtctttgaatattctgtttcaattaatcagaaaatgaacattttctctcctgccatgtgagggaggtgcacttgtttggttgcatgggagtttagaagaaaactatcttaggtatttcttctgtataatttcaatgaattgcaacgtttccaacacttctccttatacctgctgtctgagatagctagtatctccagttccttagattcctggagttctttgatgagaaccagctagattcttgatgtcatccccctattggacagtttggactcagctttctctgttctggtatgttaaggttgctactccttcattccctttcttgctttcaaatatttgttaatcttttttgtctactatcatttcttccatgtctttctgttattttaatttcacatttcaggaggtttctgagataaatacatgtgtgcagtctgctattttgaatcagaagtcctgaaagtccaacattattgccagtgcttttattgtttctgtgataggcactgtgttccaaggcagctcatttcctctttggtaagcactgttttttagtggctgcttatcttgggtgaaagtctttgtctctgtaggactattgatcctaattctacaccttagagtattccaaataaatctgttgtcttccacttggtaacctttcatagacttaaagacagtattagaactttagtattttttcttctctagcgtagagataacctagtttctctatttgatcctcagaaaatactgtttcaaatttcttcactatcctggtcactcacttctgaattaactgttcttaaagaatgatacctggaattgagagcaatactccaggtagaatctaaccagcacagactagagtaaattattatcattttcttttgaaatattgttgtgataaaaaaaaataaacctagcactcctggtatgttctgcaaagggaagagtttctcagaattttatctgcttgaaattaaagaaaaaatgtaaagcttctactacttctatatatagagagagagacctgaaacatacaatgattttgttttgtttttaattagatcaattggtgctcctttttaaaaataatctggagygtaggttgagaattaagatgttctgcataataacgtaacatgaaattttaaactttaattttgaaatatttttagagtcatgtagaagttgcaaaaatagtacagagttcagatgtactcttcacccagcttcccccaaagacatcttatataaccatagtataattatcaaaatcagaaaactgacattggtacaatactatttattaactaaactactgaccttatttggatttcaccaggttkttgtttgtttgtttkttttttgagatggagcctsgctctgttaccaggctggagtgcagtggtgtggtcttagctcactgcaccctcgcctcctgggaacaagcgattctccttcctcagccatctgagcagctgggatcacaggcatgcatcactactcctggctatggctaatttttgtatttttttcttttagtagagacggggtttcaccatgttggtcaggctgatcttgaactcccagcctcaagtgattcacctgcctcagcctcacaagatttcacagttattatatacaatccttaaaaaaaaatgtttgggggatgtatgtagttctacaggattttatcacatgtataaattcatatgaccattatcacatttgggatatagaactcccaaagaaactcccatgtgctagccgtttacagtcacaccccaatcctaacccctggcaaccactgatctgttttccattaccatacttttgttactttgagactgttatgtaagtggaatcatctagtatgtgaccttttgaaacccartagtttttcaacagttacctcaccgcacccccacagaagtctttagtttctattgttgccgtttttatgtccatgagtaccccatgtttagctcccacttataagtgagaacatgtggtatttggctttctgttcttgcattaattcacttaggataaaggcctccagttgcacccgtgttgctgcaaaggacatgattttgttctttttttatggctggatagtattctgtggtgtatatgcaccacattttctttatccagaccacatctgatgggcatctaggttgattccacatctttgctattgtgaatagtgctgcagtgaacatgcgagtgcatatgtctttttgatagaattacttgttttcttttgggtatatacccagtatgggtaatcggattcctgggtcaaatggtagttctgttttaagttctttgagaaatcttcaaactgctttccatagtggctaagctaatttgcattctcaccaacagtgtataagtgttcccttttctccacagcctttccgacatctgttgttttttgactttataataatagccattctgacatctgactgatgtgagatggcatctcattgtgattttgatttgcatttctctgatgattagtgatgtggagcattttttcgtgttcattggccagatgtatgtcttcttttgcgaagtgtctgtgcatgtctttcgcccatttggaagtgttttgtggttcttgtagagatatttcccctctttgcttagatgtagggttttttgtttgtttgtttatttgttttatttttattttttggtggggtgtggggtatggctattgtaaatgggattgcattgttgacttgtttgcccactttttaattggactgcttacttatttacagttgaggttagggatttccttattgattctagatataaattatttctcaaatatatgtgatttgcaaatattttctcccaatctgtggcttcttttctcattttcttaatatctttcacagaggaaaagttttaattatgatgaagtctaatttattaattttttcctttatgggttgtacttttggtgtcatatctaagaacattttccctaaatttaggtcacacagagtttctcttgttttttccctaagagtcttatagttcaacatctgataaaattatgcatttgaagtttgttaattttggtataaattgtgaggtttaggtcaaggtccattttgtctcctacaggagaccagttgtcccatcaccacttgttaaaacgactatccttgcttcattaaattgcttttatgcctttgtcaaaaattggttgtctgtacaagtgtgagtttatttttttgctcttttttgttctattgatctgtgtgtctgtctcccaatacgaccgtttaactgttgtgcctctatagtaagtctttaaaaagctaatgtgattacccttattttattctttttttcaaaattcttttagctattctagttcctttgcctttccatataaattttagaatcagcttgttcatgtataaaaatctgttaggatttttataggaattgcattaaaccaactgcagatcaatttcgagagaattgatgtctttactctctaaagcctccgaatccatgagaatgccacatctctccagttatttaggtcattaaaacctttttttggcctggtgcagtgactcatgcctataatcccagcactttgagagactgaggtgggaggatcacttgagcacaggagttcgagaccagcctcagcaacatagtgagacctcatctctacaaaaaatagaaaaattcgccaaccatggtggcacgtgcctgtagtcccagctactggggaggctaaggcgaggtgattgattgagtctgggaggtcaagggtatagtaagccacaatcatttgtgccactgcacttcagcctcggtgacagagcaagaccctgtctcaaataaagtaaaataaaattcatcagtgttttgtagtttttggcacacagatcctgtgcatgttttgttatatttctacccgaattttaatttttttttagtgttattgtaaatgttctgggaaattttattacctgtcatattgttgggccttcccactgtagctttatattttattaaaacatatatttttgactgagttcagtggctcgcacctgtaatcccagcatttaggaggttgaggtaggaggattgcttgagcccaggagttcaagactagctcaggcaatatagtgagacctctatctctacaaaaaatttttaaaaattaggcaatatagtgagacctctatctctacaaaaaattttaaaaaattagccgtgcatggtggtgcatgcctgcagtcccagctactcaggaggctgaggcaggaggattgcttgagcccaggattttgaggctgcagtgagctatgatcatgccactgcactccagcctgggtgacagaacaagaccccgtctcaaacaaaaaaacaaaacaaaaacaaatggggcgctcgcttcagcagcacatatactaaaaatgatagagaagattagtatggtccctgcacaaggatcacactcaaatgttacatattataatttaaaaaaaatggggaaactgagacttagaacagtcaagtaattaattgcctaaggttacaaaattggtaaacagtagagctaggattcaaacccaggtgtggctttagaatctctaacatgatgctaaccactatacaatgctgcccagagcaaaaccatcctgatatactctaacagcaactgttttttaagttttgggtatatattgttgctcaaaagtgacaagactactaactttatcttttgtgttacccagattaaaattctttcaggaaaaaatgaactatatataatattaagattaatgtatttcatcatctgccttcttcttatctaaatcaaagaattcccagggggcctggcatggtggctcacacctgcactttgggaggccaaggtatgaggatttaatgagcccaggagttcaagaccagcctgggcgacagagtaagatcctgtctttacaaaaaaaaaattttttttttcttgagacggagtcttgctctgtcgcccaggctgggagtgcagtggtgcaatcttggctcactgcaacctctgccgcccaggttcaagcgattcttttgcctcagcctcctgagtagctgggattacaggcacatgccaccacacccagctagtttttgtatttttagtagagacggggtttcaccatattggtcaggctggtctcgagctcctgaccttgtgatctgcctgcctcggcctcctaaagtgccaggattattggccgggcgcggtggactttcaagttcatatggaatcaaaaaagagcctgcattgccaagacaatcctaagccaaaagaacaaagctggaggcatcatgctacctgacttcaaactatactacaaggctacagtaaccaaaacagcatggtactggtaccaaaacagagatacagaccaatggaacagaatagagccctcagaaataataccacacatctataaccatctgatcactgacaaatctgacaaaaacaagaaatggggaaaggattccctatttaataaatggtgctgggaaaactggctagccatatgtagaaagctgaaactggatcccttccttacaccttatacaaaaatgaattcaagatggattaaagacttaaatgttagacctaaaatcataaaaagcctagaagaaaatctaggcaataccattcaggccataggcatgggcaaggacttcatgactaaaacaccaaaagcaatggcaacaaaagccaaaattgaaaaatgggatctaattaaactaaagagcttctgcacagcaaaagaaactaccatcagagtgaacaggcaacctacagaatggggagaaaattttttacaatctacccannnnnnnnnnnnnnnnnnnncatattataatttaaaaaaaatggggaaactgagacttagaacagtcaagtaattaattgcctaaggttacaaaattggtaaccagtagagctaggattcaaacccaggtgtggctttagaatctctaacatgatgctaaccactatacaatgctgcccagagcaaaaccatcctgatatactctaacagcaactgttttttaagttttgggtatatattgttgctcaaaagtgacaagactactaactttatcttttgtgttacccagattaaaattctttcaggaaaaaatgaactatatataatattaagattaatgtatttcatcatctgccttcttcttatctaaatcaaagaattcccagggggcctggcatggtggctcacacctgcactttgggaggccaaggtatgaggatttaatgagcccaggagttcaagaccagcctgggcgacagagcgaaactccgtctcaaaaaaaaaaaaaaaaaaaagtgccaggattacaaggcgtgagccaccgtgcccagccacaaaaaatttaagatcaactgggtttgttggcgcatgcctgtagtcttagctactccagaggctgagatgggaggatcacttgagcccaggagcccaggagttggaggttacagtgggccatgatggtcccactgcactccagcctgggtaacagagtaaaaccctgtctcttaaaaaaattaaaaaaaaaaaaaaaaaaaaaaagaattcccaggatatacaactgtcagagaatgagaataacacacacacatacacacacacacacacacacacacacactaaatctctcattatccttaatagttacaaattgatttcatttttatttaagattactcagaaaaatttattggacttttaatttatgttaagaaattgttttaaaaggccatcagaaattctattaaaatcatgaggcttttttttttttttttaagacagagtctcacacagtcacctagactagagtgcagtggtgcaatctctgctcactgcaacctctgcctcccaggtacaagtgattctcctgcctcagcctcctgagtagctgggattacaggtgcccaccaccactcccggccattttttgtatttttagtagagacagggtttcaccgtgtcagccaggatggtctcgatctcctgacctcaggtgatccacccgcctcggcctcctggaatgttgggattacaggcatgagccaccacaaccagcccatgaggtttttataaattatatgtgctacgcatttgctaatttagacaatgtagtgtgctgtttataaaagttggcagcatttgagaagttaatcttgactctgtctcatgtccagccagggctgttagactgtcccagagaaggtgatgatcactgacaataacgtgttgataaatctttgaagcctttcaattaagaaagtcctctggaatgtaaacatagatgttatacctgtcacaaaaactaacttaaaatagatcatacacataaatgtaaaatgcataacttataagacttctagaagataacataggagaaatctagtgaccttgagtttggccatgagttttagatacaactcaaatagcatggaggaaaaacattgataaaattgactttaaacttgtgttctgggaaagacacagtaaagggagttaaaaggtaagtcacaaactgggaaaaaatctttgcaaaacacatatctgataaaggacttgtacccaaaatatacaaaaaacacttacaattcaacaataagaaagtgaacaacccaattaaaaagggagcaaaagatctgaacagacacctcaataaagaaaaygtagagacagcaaataaacactaaaaagacgctcatcatttgtctttagggaattgcaggttaaaacaatgagataccattaaagtctgttagaatggctaaatttaaaaactgaaaaactggtgaggatgaaaaacaaaagaaactctcatctttgctggtggaaatgcaaaatgatatagccactttggaaaagagtttggcagtggcttacaagaaagataaacatattcttaccatatgatctagcaattaatcgcatttctaggtgcaatagacatacccagttgagttgtaaacttacgtccacacagaaacctgcaaaggaatgtttacagcagctttattcataactgcccccaaactggatgcaacagattgtcccttgataggcraatggataaccaaactattgtgatacattcatacaatggaatgttattaagcgatcaaaagaaaggagatattaaaccaggaaaagacatggagaaaatatagatgcatattattaagtaattgaaaaacctatatactgtaacaattccaattatataacattctggaggaggaaaattatggtggcagtaaaaagatcagtggttgtcgggttgtggacagtagtgagggagggatgaataggtgaagcagagtggtattttagggtggtgaaactattctgtacgcactgtaatggtgggtacatgacattatgcatttgttaaagtctgtagaactttacagcacaaaaagttaacctcagtgtgtacaaatttaacaatagctttcacaggtaggcatggtggcttctgcctgtaatcccagctacttgggaggctgaggtaagaagatcactggaggccaagagttcaagtccagcttgggacttgagttcaagtccagcaacatggcaagaccttgtctctaaaaaaaaaaatttttttaaggaaaaaataatataattcaggaggccacgggatttgggaaagaaagcagactgtgacaagagcatctaactgtattacaaatatatgaaacaacctcacygaagggatggggagaaaagtgctaccctaactttgaaaatgactggagtctgtaaaactaaaggccaaaggaactgtacaagagtacttactcaagttgataaagtttttctgcatgggtttataggttaataaatgcattgttgctatacttgtatactaacattgaacaataagaaaatagatagcagatagtgggagccaggtttctcactgttggagtggaaattttatgtacactaacattgaacaagaagaaaatagatagcagatagtgggagccaggtttttcactgttggagtgaaaattttacaaatcaacaagggaggaagctagaatgacccatgtggtaatggattaacgttgaggatactagaacagctcatatatagttagatagttgcttgtggaaatttttatagatgggtatgtgcacaagttagtatacatactataaagtttagaagtttacaacaccaccaccacttctgactccaattgtaagtttaggggtccccaagatcaccctcatgttgaataattccctagaggtactcacagaactcactgaaagctgctatatttacagttatggtttattacaataaaaggatacatattaaaaccagccaagggaagaagcacatgggacagagtacaggagaattcctcatgtgaagcttccagtttcttctcctgctggactaatggacagtggtaacttcccccagcaacaatttgtgacgacacgctagaagtattgccaaccaggtaagatcactcaagccttggtgtccagagtttttgttggggcttggtcatatagacatgattgactactcacatggctgttttttgttacagataccacatggctcaaaacctccaccattaattacattgttagcataggctatctggcatggcctaaagctcccaggttaacaaggacctacttttcagtcaggcattacagaggcttagagaatacctccctggagccaagggcaaaagccagaccaattcagtagtaacaagtatacctaatgctcagatcttggtttctaatattattcttcagtaagagtaaccaggactccttggagaaatggctgattccagggatagggtagaaaatgtacagaaccagcctggggcatcttgtagaggcagaaagtaagaaagtgctaaagaaaaaaaaaagatcactgtgagaggtatgtaaaagaagccaaatgaaagagcacccaatgggaaaatttagaaatatttgagcaaaataaatgaatgaataccatactattgtattataacctaaagtataacataaatattcatgattgtggtgggttgcagctgatctgggccagcgtcatcagtggtaaaataatttgctgaaacagctgtgagttaataattgtaataataagtaagtgtattagagagaaagtatgttgcaaggaagcattgggcagcacagcagagaaaaagctgtctgcaaaggggcagggctggagggaagttttataggatggacctggagggactacatgtagaacaaggtattcgggaacaggatattgtgcaaacgggatgtttgtagttagctgtttctcagaacaattgttctcactcaccctggggcaccccccttgttgttgctaacttatcaggactccacaatgagttcatactgatatataaataattggataaattaataaatggaagtgaatagacaaatctttccatatggaataatgctaattatattatctagatacttcatcctgaggatgggaggttaattctccactccttaagtgtgggctgtgcatagtgacttccttccagagtcccttatgaaaagtggagagtgggaggaaaggaataacttcatgggagagacgtgacaaacacaccttcaagccaagtgattatggtcaatataaacagtcataaatcatgttgatatcatatataccctcaatatgctatgatgaaaaatggcactttatctctgtgatctttgtcacaaaagtctgtaacaccaatctaaccatgagaaaaacaaatamtttttttttttttttttgaggcggagtcttgctctgtctcccagactggagtgcagtgcagtggtgcaatcttgactcactgcagcctccacctcccaggttcaagcaattctcctgcctcagcctcccgagtagctgggattacaggtgcacaccaccrtgaccagctaatttttgtgggtttttttgtttgtttttcatttcgagacagagtcttactctgttgcccaggctggagtgcagtggcatgacctcggctcactgcaacctctgcctcttgggttcaagcgattctcctgcctcagcctcctgagtagctaggactacaggtgtgcaccaccacgcctggctaatttttgtattttttagtaaagatgggatttcaccatattgcccaggctggtcttgaactcctgacctcgtgatccgccctccttggcctcccaaagtgctgagattataggcatgagctgctgtgcctggccaatttttgtatttttaatagaaacrgggtttccctgtgttgggtaggctggtctcaaactcctgaccttaagtgatccacccaccttggcctcccaaagtactgggactacaggcatgggagccacagtgcccagcctgagaaaaacaaattctaatagagggccatcctgtagtatacctraccagaactctttaaactgtcaagatcctcaaaaagagaaagtctgagaaacaatcacagctaagagacacctaaggagacgcgacaagtaaacgtaatatagtggcatcctgaatgggatcctggaacagaaaaaggacattaagtaaaaactaaggaaatcaaactatggaccagttaataataacttttcagtattcattcattaactgtaataagtgagccatactaacataagctgttaataataggggaaaatggaaaatgtgtgtgtatgttggggggtatatgaaaatgctacactatctactcaatttgtaaatcaaaaactgttggctgggcgcagtggctcatgcctgtaatcccagcacttcgggaggccaaggcgggtggatcacttgaggtcaagagtttgagaacagcctgatcaacatggtgaaaccttgtctctactaaaaatacaaaattagccaggtgtggtggtgcacacctgtaatcccagcactttgggaggccaaggcgggtggatcacttgaggtcaagagtttgagaacagcctgatcaacatggtgaaaccttgtctctactaaaaatacaaaattagccaggtgtggtggtgcacacctgtaatcccagctactcgggaggatgaggcagaagaatctcttgaacctgggaggtggaggttgcagtgagccaagatcgtgccattgcactccagcctgggcaacaagagcaacatctctgtctcaaaaaaaaaagtttagaatgttttgattttaaaaagaattataattttaaaaagtgtagaacaggccgggcgctgggtggctcatgcctgtaatcctagcactttgggataccgaggcaggcagatcacgaggtcaggagatctagaccatcctggctacatggcgaaaccttgtctctactaaaaatacaaaaaaaattagtcgggcatggtggcggcgcctgtagtcccaggctggagaatggagtgaacctgggaggcagagaacctgggaggcgtgaacctgggaggcaggagaatggcatgaacctgagaggcggagttttcagtgagccgtgattgcaccacggcactccagcctgggcgacagagtgagactccctctcaaaaaaaaaaaaaaatgaattaaataaaaattaaaataaaaaactagctgggcgtggtggtgcacatctgtagtcccagctatacttggaaggctgaggcaggagaattgcttgaacccgggaggtagaggttgcagtgagcggagatcgcgccacttagcctgggtgacagagcaagatcctgtctaaaaaaaataaaaataaaactgtagaacaaggccgggcacagtggctcacacctgtaatcctagcactttgggagkccgaggcaagcggattgcttgcgcccaggaatttgagacaagcctgggcaacatggtgaaaccctgtgtctaaaatatatatgtatgcaaaaattagctgggcatggtggtgtgtgcccagagtcacaactgctcaggaggctgagatgggaggatcaactgagccctggaggttgagggtgcactgagccatgaccatgccaatgcactccagcctgggcacagagctagaccctgtctcaaaacaaaacaaaacaaaacattgtgaaacaatgaagattgtaggggaaatggcatatgaaaaagtgatttattataaatgggatcccctaagcatacaatgtaaacaaatatctgaccttcaaaggagggtgcagagtatgctttgcaagtctttaggcagagcattatagttttgtcacatacctttctatacgtcatatggagttaaatacagagatacattattttgggaattaaattcttaagaattatagtactattttttgagaaatgtatttcaactgtcattttactgaaggactgtaggtcctgggatattagagaatttcacttattacaaagattaaaagcaaacatgattaatatttacaaatatattgaattattatctgaatttattgtgaagattttctaatatgatgagttgattttaaaagttaccaatgtttctggtataaaaaaaattataactaattgtaatttatatttcaaatgggtatgaaagtgaataataagggtaacaataaaaggaagaaaataaaattataataaaaatgagaacataatgcttacagattaaaaagtgatataaagggataacttttcagaagagattaaaaactatctagaataatataatatacattgtatgactgctggattttatgagtacatcctccagcctcttattgagtttgtaaagaaatagtgactgtttccctcattaatggcaagtgtaaatagccgaggtgggcattcaaagacagtttaccatctccccacatggggcttttgaaggttgtcactaaactaattatttccatgaaaatgtgttaatggaatttatttcactgttgagtcttctacttagagtcttttatagaggcaacatattttataaaactgcatggaaaaagatatcagcaatcaatctttagagtagtagacttttgcaaaaacatgatttctcttgtatttgtaccctaataagaaatctagcagtcttctagcaaagaacatcacaacatcttacagaaaatttggtttgaactaagagactaaagagacatagagaccaaatttttaaagttaaaatatttctatcaataaccttttattcaagcattattgagtgttgttttcattagataatggcactggcttctcatatatattgcatatagtattgcagtctgggaatggcatagtcactttcctccattatggtaagctttgcctgtgtctgaatgcccagccttaacagtgttgctaatcacttatgcgaaatgtgtgaccaagtctacatttgctggaaatttytgacattgtaaatatttgggtatattgttgtaatcatcattaattagtattttcaggaaggaaccaggggtaacatatagcaacctagcaagtggatttacttttacagattcattcctctacagttctgttcatgggtcatggttggttttttttttttttcagtttcttttattgtggtaaaatacacataacgaaatgttctgtcttacccatttttaagtatacaatttattggtattaagtatattaatattattgtacaactatcaccaccatccatctccagaactcttttcattttgcaaaattgaaactttctatccattaaacagtaacttctcattccttcctcctcttagcccctggcaaccatcattctgctttttgactatgatttggactacaatgaataactaatttaagtggaatcatacagtatttatctttttgtgaccaatttatttcagttaacatgatgtcctcatcaaggttcactcatattgcagcatatattagaatttatttatttttgtttgtttgtttttgagacagagtctcgctctgtcgctaggctggagtgcagtggcgcgatcttggctcactgcaacctcctcctcccacgttcaagagattctgctgcctcagcctcccaagtagctgggactacaggcgtgcgccatcacacccagctaatttttgtatttttagtagagatggagtgtcaccatgttggccagcctggtctcgaactcctgacctcaggtgatctgccgaactcggcctcccaaaatgttggtattatacgcatgagccmccgtgcccagccaaaatttatttcctttttaaggctgaataatattctgttgtatatatgtaccacattttgcttatccattcatcagtcagttgatacctgggttgcttccatgttttagctactgtgaataatgctgctatgattacaaatgttatgattataaatgtataagtatctctttgggacccaattcttttgagtatatacccatagaattgctgggtcatttggtaattctattttaaactctttgaggaaaccgttttccacagtggttgtactattttacattttctttcttttttattattattatactttaaattctagggtacatgtgcacaacatgcaggtttgttacatatgtatatgtgtgccatgttggtgtgctgcacccattaactcgtcatttagcattaggtatatctcctaatgctatccctccccgtttcccccatcctatgacagactctggtgtatgatggtccccaccctgtgttcaagtattctcattgttcaattcccacgtatgagtgagaacatgtggtgtttggttttctgtccttgcaatagtttgctcagaatgatggtttccagcttcatccatgtctctacaaaggacatgaatgcatccttttttatggctgcatagtattccatggtgtatatgtgccacgttttcttaatccagtctaccattgatgggcatttgggttggttccaagtctttgctattgtgaatagtgccacaataaacatacgtgtgcatgtgtctttatagcagcatgatttataatcctttgggtatatgcccagtaatggaattgctgggtcagatggtatttctagttctagatccttgaggaatcatcacaatgtcttccacaatggttgaactagtttacctcccaccaacagtgtaaaagtgttcctatttctccacatcctctccagcacctgttgtttcctgactttttaatgatygccattctaactggtgtgagatggtatctcattgtggttttgatttgcatttctctgatgaccagtgatgttgagcattttttcatgtgtcttttggctgcataaatgtctttttttgagaagtgtctgttcatatcctttgcccactttttgatggggttgtttgattttttcttgtaaatttatttaagttctttgtagattctggatattagccctttgtcaggtgggtagattgtaaaaattttctcccattctgtaggttgcctgttcactctgatggtagtttcttttgctgtgcagaagctctttagtttaattagatcccatttttcaattttggcttttgttgccattgcttttggtgttttagtcatgaagtccttgcccatgcctatggcctgaatggtattgcctagattttcttctaggctttttatgattttaggtctaacatttaagtctttaatccatcttgaattcatttttgtataaggtgtaaggaagggatccagtttcagctttctacatatggctagccagttttcccagcaccatttattaaatagggaatcctttccccatttcttgtttttgtcagatttgtcagtgatcagatggttatagatgtgtggtattatttctgagggctctattctgttccattggtctgtatctctgttttggtaccagtaccatgctgttttggttactgtagccttgtagtatagtttgaagtcaggtagcatgatgcctccagctttgttcttttggcttaggattgtcttggcaatgcaggctcttttttgattccatatgaacttgaaagtagttttttccaatactgtgaagaaagtcattggtagtttaatggggatggcattgaatctataaattaccttgggctatatggccattttcacaatattgattcttcctgtccatgagcatggaatgttcttccatttgtttgtgtcctctcttatttcattgagcagtggtttgtagttctccttgaagaggtccttcacatcccttgtaattggatttccaggttttttattctctttgaagcaatcgtgaatgggagttcactcatgatttggctctctgtttgtctgttattggtgtataggaatgcttgttgtgatttttgcacattgattttgtatcctgagactttgctgaagttgcatatcagcttaaggagatttggggctgagacggtggggttttctaaatatacaatcatgtcatctgcaaacagggacaatttgacttcctcttttcctaattgaatacgctttatttccttctcctgcctgattaccctggccagaacttctaacactatgttgaataggagtggtgagagagggcatccctgtcttgtgccggctttcaaagggaattcctccagtttttgcccattagtatgatattggctgtgggtttgtcataaatagctcttattatttttagatacatcccatcaatacctagtttattgagagtttttagcatgaagggctgttgaattttgttgaaggctttttctgcatctattgagataatcatgtggtttttgtctttggttctgtttatgtgatggattatgtttattgatttgctcatgttgaaccagccttgcatcccatggacaaagccaacttaatcatggtggataagctttttgatgtgctgctggattcggtttgccagtattttattgaggatttttgcattgatgttcatcagggatattggtctaaaattctcttcttttgttgtgtctctgccaggctttgctatcaggacgatgttggcctcataaaatgaattagggaggattccctctttttctattgattggaatagtttcagaaggaatggtaccagctcctctttgtagctctggtagaattcagctgtgaatccatctggtcctggactttttttggttggtaggctattaattattgcctcaatttcagaacctgttattggtctattcagagattcaacttcttcctggtttagtcttgggagggtgtatgtgtccaggaatttatccatttcttctagattttctactttatttgtgtagaggtgtttatagtattctctgatggtagtttgtatttctgtgggattggtggtgatatcccctttattattttttattgcatctatttgattcttctctcttttcttcattagtcttgctagcagtctatcaattttgttgatcttttcaaaaaaccagctcctggattcatcgatttttttgaagggtgttttgtgtctctatctccttcaattctgctctgatcttagttatttcttgccttctgctagcttttgaatgtgtttgctcttgcttctctagttcttttaattgtgatgttagggtgtcaattttagatctttcctgctttctcttgtgggcatttagtgctataaatttccctctatacactgctttaaatgtgtcccagagattctggtatgttgtgtgtttgttctcattggtttcaaagaacacctttatttctgccttcatttcattatgtacccagtagtcattcaggatcaggttgttcagtttccatgtagttgagcggttttcagtgagtttcttaatcctgagttctagtttgattgcattgtggtctgagagacagtttgttataatttctcttcttttacatttgctgaggagtgctttacttccaactatgtggtcaattttggaataagtgtgatgtggtgctgagaacaatgtatattctgttgatttggggtggagagttctgcagatgtctattaggtctgcagatgtctattaggtgcagagctgagttcaattcctggatatccttgttaatttcctgtcttgttgatctgtctaatgttgacagtggggtgttaaagtctctcattattgtgtgggagtctaagtctctttgtaggtctctaagaacttgctttatgaatctgggtgcttctgtattgggtgcatatatatttaggatagttagctcttcttgttgaattgatccctttaccattatgtaatggccttctttgtctcttttgatctttgttggtttaaagtctgttatatcagagactaggattgcaacccctgcttttttttttccatttgcttggtagatcttcctccatccctttattttgagcctatgtgtgtctctgcatgtgagatgggtctcctgaatacagcacactgatgggtcttgactctttatccaatttggcagtctgtgtcttttaattggagcatttagcccatttacatttaagrttaatattgttatgtgtgaatttgatcctgtcattatgatattagctggttattttgctggttagttgatgcagtttcttcctcgcatcgatggtctttacaatttggcatgtttttgcagtggctggtactggttgttcccttccaagtttagtgcttccttcaggagctcttgtaaggcaggcctggtggtgacaaaatctctcagcatttgtttgtctgtaaaggattttatttctccttcacttatgaagcttagtttggctggatatgaaattctgggttgaaaattcttttctgtaagaatgttgaatattggcccccactctcttctggcttgtagagtttctgccaagagatccgctattagtctgatgggcttccctttgtgagtaacccaacctttctctctggctgcccttaacattttttccttcatttcaactttggtgaatctgacaattatgtgtcttggagttgctcttctcaaggagtatctttgtgatgttctctgtatttcctgaatttgaatgttggcctgccttgctacgttggggaagttctcctggataatatcctgaagagtgttttccaacttggttccattctccccgtcactttcaggtacaccagtcagacagagatttggtcttttcacgtagtcccatatttcttggaggctttgttcatttctttttacttttttctctaaacttctcttctggcttcatttcattcatttgatcttcagtcactgataccctttcttccacttgatcaaatcggctaccraagcttgtgcatgcatcacgtagttctcgtgccatggttttcagctccatcaggtcatttaagggcttctctacaatgtttattctagttagccgttcatctaatcttttttcaaggtttttagcttcctggagatgggttcgaacaccctcctgtagctcggagaagtttgttattaccgatcgtctgaagccttctctcaactcatcaaagtcattctccgtccagctttgttctgttgctgacgaggagctgtgttcctttggaggagaagaggcactctgatttttagaattttcagcttttctgctctggtttgtccccatctttgtggttttttctacctttggtctttgatgatggtgatgtacagatggggttttggtgtagatgtcctttgtgtttgttagttttccttctaacagtcaggaccctcagctgcaggtctgttggagtttgctggaggtccactccagacactgtttgcctgggtatcaccagcagatgctgcagaacagcaaatattgcagaatggcagatattgctgcctgatccttcctctggaagtttcgtctcagaggggcacctggctgtatgagatgtcagttggcccctactgggagatgtctcccagttaggctactcctgggtcagggacccacttgaggaggcaatatgtcctttctcagatctcaaattccatgctgggagaaccactactctcttcaaagctgtcagacagggatgtttaagtctccgaagtttctgctgccttttgttcagctatgccctgctcccagaggtggagtctacagaggcaggcaggcctccttcggctgcggtgggctccacccagttcaagcttcccagccactttgtttacctactcaagcctcagcaatggtggttgccccttcctcagcctagctgctgccttgcagttcgatctcagactgctgtgccagcagtgaacgagactctgtgggtgtgggaccctccaagccaggcatgggatataatctcctggtgtgctgtttgctaaggccattggaaaagtgcagtattagggtgggagtgacctgattttccaggtaccrtctgtcacggcttccctttgctaggaaagggaattcctcgaccccttgcgcttcccgggtgaagcactgccccaccctgctccgtgggctgcacccactgtctgacaagccccagtgagatgaacccagtacctcagttggaaatgcagaaatcacccgtcttctgtgttgctcatgctgggagctgcagactggagctgttcttatttggccatcttggaacccttattttacattttcaacagtgcacagggttctgatttctccacatccttatcaatgattgttgttttctgtttttctgatrgtagccatcctaattagtatgtacctcattataattttgatttgtgttttcctaatgattagtgatactgaacttttttttttaaatgtgctttatgaccatttatgtatcttctttttttgtttttttttgtttttttttttgagatggagtctcactctgtcaccaggctggagtgcagtggcgtgatctcggctcactgcaacttccacctcctgggttcaagtgattctcctggctcggcctcccgagtagctgggactacaggtgcacaccaccacatccagctaatttttatatttttattagagacggggtttcaccgtgttggccaggatggtctcgatctcttgacctcgtgattcgcctaccttggccttccaaagtgctgggattacaggtgtgagccaccacgcctggtctaccatttgtatatcttctttggagaaatgtctattcaagtcatttgcccactttttaattgggtggtttggtttttatattgttgagttctgtattaactccttgtcagatatatgatttgcaaatatgttctctcattctgtgggttgtctttctactctgttgatagtgtcttttgatgcacaacatttttaaattttcataaagtccagtttgtctattttgttgttgttgcctgtatctttgatgtcatatctaagaaagcattgctacatctaaggttgtgctttcttctttcttgccttatgttttttaaaataataattttatagtattaggtcttatatttaggtcatggagccatttggggttaattttagtatatagtatgaggtaaggtccaatttcattcttttgcttgtggatatccagtttttccagatccatttgttgaaaaggctgtatttttctccactggatggtcttgacacccttgtcaaaaatcactttaccatatatgcaaggatgcatttctggactccctattgtatttagttgttctacatatgtgtctgtctttatgtcagtactattctgccttgattactgtagctttgtagtaacttttgaaatcagaaagtgtggctgggcttggtggctcatgcctgtaatcccagcactgtgggaggctgggatgggtggatcacctgaggtcagaggtttaagaccagcctggccaacatggtgaaatgccatctctactgaaaatacaaaaattagttgggtatgatggcacacgtctgtaatcccagctattcctcaggagactgaggcatgagaatcgcttgaacccgggagacagaggttgcagtgagccgaaattgcaccactgcactccagcctggacgacagagtgagactctgtcccaaaaaaagaaaagaaagtgtgaagtgtgaatcctccagcattgtttttccttttcaggattattttggctatttggagtcccttgaaattccatataaatattaggatgagtttgtctttttctacaaaaaccgttatttggatattgatagagattgcattaaatcagaggatcactgaataatattgacatctgaacaatattaaccccttcagttcatgaacatggaatgtctttttttaatgtcctctttaatttctttcaaaaatatttagtggttttcattgtattgcttctttggttcatacctaagtattttattctttttggtgctactataaatagaattgttttcttaatttccttgtcagattgttcacatttagtgaatagatgcaactgatttttgtgtgttgactttgtatcctgccattttgatgaatttattagttctaataggtgtgtgtgtatgtgtgtgtttgtaatctttagggttttctacatataggatcacgttatctgtaaagagataattttactttttccttgccaatttggatggcttttacttctttttcttgcctaatttctctgactagtacttctagcactctgtagaatagaagtagacaagcaggcaaccttgccttgttcctgatcttagaggaaaagcttttcgtcttttcatcattgaatatagtgstttttgtgggtttttcatatatgacttttattacagtgaggtagtttccttctattcttagtttttttagtgtttttatcattaaagtttttttgaattttgtcaaacatcaattgagatgatcatgtgggttttttccttcattttgttaatgtggtatattacattgtttgatttttcatgtgttgaggcatccttacagttccggaataaatcccattcagtcatggtgtataattattttaatatgctgctgaattctgtttctagtattttgtctcatggtcatgattttcaaccaagtgagataaattatttaaaatgataaaacttgaggtcacagggcaaactgctgctcccaaaattggagatactgacaggtgaaaatagagaatcacagcttagtagagcagaaacccacaagtagcaacctctgcaggtaccagtatcagagtagggaaatctgaattgtaattgatgtattcctggaaactcaagtgtggacaactctgagagttaacccagtcatatgggtgccccgacacttttgtgagttttacctccaagagctctatcaaattctcacagtgaatatgcgagaaaaatccccctgtgcttctggaagggaaaggggaaaaggaaccatgtggaactacaccagaacactttgctcttcttaacaaggtctcccctaaggagaaattagttaactaaataggatctaacctgctagggttttgttagagcctaactgacctgggataagctgcatacccacctccagcccactctatacatccttccccaactaaggggtaaggagtggggtagactgagaagcaacatgaagttcacagtgtggaggtacaggctcactgaaagatagaaacctaatcataggactgtagaatgcttccccttcctccacatcttactaccacgttactaaaggcctagttatagcaattccttttacccagtacatcgtgcctggctattaagaaaaattacaagacatgctaaaaggcaaaaacacagtttgaagagatagaggaagtatcataactagatatggcagggatgttggaattatcagaccagaaattttgcagcgagttttaggacctacttataagttaggaccttaaagataaattttttaaatatatagggaaatttcaattatagatgaattttagttcataatagtaacaaaccatcctacgtttctcagcttgtgaagcaaattatctgcagtactactgagtcctttagagttaatctttttggttaccaattcttgcttgatggacattagtaccagcccagtgaatcttcccctgtggtgcggtataaattattttagacaatacagactagatgtttattgctatacagatttatcaaagaaatatgtagaagatacatagggaaaattgttatgaatagcatactgaataaacaaatagccaaaataagtttacttaatatggtcatggaaattgatctttggtatttccagtgaaatcaaacttttgaagtatatcttatctgtgaaacttgtatgtattcagctattgcattatctaaaagcttattccatttaagtggtaattgtgaaattttttttgttttgctaataattctctggaaaatattaatcttgagttctgtattctaatgtttagtaatatgtgttcattttattttattttattttttgagayggagttttgctattgttgccgaggctgtaatgcaatggcgcgatctctgctcactgcagcccccacctcccggattcaagcgatctcctgcctcagcctccctagtagctgggattacaggcctgcgccaccatgcctggctaattttgtatttttagtagagacaggatttctccatgttggtcaggctggtcatgatatatgttcattttatgatgtcttccaacaattaagagaaaatgcactacctgaatggtaattgttatgggctgaattgtctccaccaaattcatatgttgaggttttaacccccagcacctcagaatgatatagggcccttaaggaggtaattaatgttaaatgaagtccttaaagtgagtcttaatccattaggattggtctcattataagaagaaaagattagggcacaaatagagaaaaagaccatgtgaagacagagggaaaagatatccatttataagccaaacagagaggcttcaataaatcaaccctgatgacatctagatctggaatttctcatctccagaactgtgagaaaattttctgttgtttaagtcacccagtctgtggtactttgttattgcagccctagcaaactaatacagtcatgatagtaattttccccctagggaaattttcttctctatatggaagtttttttaagattaaaaatttggaaataattttaaatttacagaaaagttgcaacaatagtccagagaacacccttatactctttactcagtttaacctattttttgccccatttgctttatacttcgtctctctacttattcatgtatatttgaaccatttgaaaataagttaaatacactatgccctgttatccctaaatacttcactacacacttcctaaaaatagggacatgcttttacataaccacagtacatttattaatttcagaaaatgtaacattgataaagtactttaatctgttgtccacattgaatggaagatttttttttttactttgaatcactgaggttgtttttgttttattttggttttgctacaataacagtggtttttgtttgtttctttgttttaatttgttttcctggggcataatggctcagtggcagtactatgtcggtagcagttttaatcagactgagtttaaattctacctctacttgcttagttgactgatcttgggaaaaattatttaacctctctgtgcttcagtttctctatctgtamggttaatagggttactgagagaattaaatgaaaaaatatgtaacagcttttagtaaagtacatgccatatagtaaggatttttattatctatccaaatcattttttaagcagtaatttttcctataggcttaacaaagaaatgttgcttctttcttttgcggtcagaaaacaatacctaaagttctactttgaagctctctggtaaaacttcctggaacagcacacaacagacgattttaaaaagataaataaattagagatgatgtcagcagatcattcaattctctagccacctatggtttaaaaaaattaattcataaaacttccattattttaataatttcaggaagctactctatcgtagcagataatataggtaaaattccgtccaatgtgtttactgtaaactgctactccctacatattatgctttgttcatctaacaaatattttgaaagttttttcattcttttctcargcatataaacaatgtcacccaaagaattaagaatgttttggagttttttcacttccataaaaaacgtcattgttaccaaattcaacagatgtgattgagaatataatgctcttgattcctccttaaccttccttataaagccaatgtttttagagtattttgcagaatcctaatttttttgtactttttattttagtttagctttttaatcaacacataattgtccatatttatggggtacatagtgatgttttgatacatataatgtatagtgatcttatcagggtaattagtgtatcatttcaaatgtttatcatttctttgtgttggaaacattcagtatcctccttctagttatttgaaactatatgttattgttaactatagtcatcctgcagtgatacagaacagtagaacttactccttctatatagctgtaatttagtatcctttaacaaatctctctctatccctttctttctcctacccttctcagcctctaatattttctgttccactttttacttccatgagatcaatttttttttttttagcctccaaatatgagtgagtatatgcggtgtttaactttctgttcctggcttacttcatataacataatgtcttccatttccacccatgttgccaagaatgacaggattttattctttttcaggctgaatagtatctcattgtgtacatataccacattttctttatctattatctattgttggacacaacaacatatgttggttattatgtatttccatatgttggctattgtgaatagtgctggaatgaacatgggggtacagatatctctgacatactgatttcctttcctttggataaatgcccaatagtgtgattgctggatcatatggtagttctatttgtagctttttgaggaacctccatattgttctccagattggctgaaaagccattacatttttaatttgcattagttatgtcattgtcaaccttaaataatgcgattcagaaagtgtgattaagtatagcgtttattcaagtgcgaaacttgaggatagccacatgggaaacacagacttcaaagaaatcgggttagtgttccaaagtgggaaagttgaggtttcacttatataggcagttaacagggttgcaacatgtttcatacagggtcagtacctatgttatggcaatttgattggttacagtttgctacgtttcaaggaagatcagttctacattctgtgagaaggggtgatgatctgaggggatcttctctctggtgccacaagacctttcctgatcatttacaggaaaaaacagaagatgcagctgcatgctacatgactcaggccacatagccaccgtcctttcaaggctcaaaataatttaaagttacaacagctttaagtttaaattatttgcattttcccctttttatcaagatcgtttgaagaaaccatcataggtgaactcaaatggttttggcttcttttattttcaggagctcagtcttccattgctaggarggcttattactagagagtcatgtcccatggcaaggagaatttgtcagactgtaaagcaaatagagtataggccacatttagaggaaggaggtgactttgtgactcaagtcaggctacatagctgcatcttcagttaaagtatttcattgagcaaccattattttagtcttttcagttgtgtgttgactccattacaaacaaatgccaaagtagcagtaagacaaaaacaggacaaaacacaacaaataattcctagaataagtaacagcttccaccaccatgtttcccaagatctaaaccagctgcctggccaattgttcagagaggtgttggatctcaaaggttggttatttgggttttcatatcagccgttaatttagtgatgttayctgattcatctgggatatagacataagactcaatttttatgatagctcaggtttccccttgggctgcagtatgtctaaagccatatggttctgcaatacagcttttctcataggaccaacttcattgttcaataatgagattcttatgtggctgtcatttagggccttttggtgtgtgtaattggttagggtctctacatgccaaatgacatcctcaatacccagttgtggcagaaagatggaaactaaatgatcttaacagtggaattcagaacaaacccaaagagattgtaaataggaagatttgcaggctttgaaagggtatgaagtattagaccttgtgcccaggcataactcaaagaatactgtcctaaccatcctgggagtaaccatggcbatggattggtgtcacacagccadtatagtccatttggagctagccagtaaatacacaatgcccattcagtggcatgccagtcagttttttgtaatataatggtgtgcatacagtattccttagttttccatcccttatttctaatggcaaaggtggtttcattattgggccatgtatcttcagtttgctccttttgttctcagcatagaggagaaagctgatgaagctgaccaaaagagggggttatgccagataaaacagtcccaaatttgtgttataccatccccaattcaagttgtctcatttttcagttgacaacttgatttcagttggggcagtactagcattaaagctaacatactsgctttaggccgggtgcgctggctcatgcctgtaatcccagcactttgggaggccgaggcgggcagaccgcctgaggtcaggaattcgcgaccagtttgaccaacatggtggaaccctgtctctactaaaaatacaaaaattagccgggcatggtgcacatgtaatcccagctactcccagctgaggcaggggaattgcttgaaccagggaggtggaggttgcagtgagccaagatcacgccactgcactccagcctgggcgacagagtgagactccgtcttaaaaaaaaagaaaaaaaaagctaacatactggtttcatctactgaaaaatctcttcccatgccccttgctttataaagtgttatcaataggccagtattatatgttatccttagtcatactaagtgttaaacaccaatgattgtttttgagaagcacggatatatttctggtcttctattcagtcttgtccttggaaaggcaatacccaccatggtgggtcagatccactggaaaggggcatgaggctacatatccaacagatgttttcctgtaatttatcagcattgtcttgagcccattgcaagaagatgtttgcttcatagacaagagctggtgatagcaacaacaaaacataagaacaagggatgaaaataaatttagtgggaacttgcaaaggatgaccttctccatctattataattattaatattaagagttcatttagatacaggcctggttcagtgtcttgggaaagctgactacctcagatgctgtctttttcttcttcttgttggctctggagaatttcaattttagatcactggcttgagatgaagtccagattggcaaagtgactttctttaaatgggtgacggatatccaagaattgattccttttagtttagcagcacaagagtcagttagatgcacttgataaggttatttcaccttcgttggagggagtcctttaaaagatgctgtttctggctgggcacggtggctcacgctggtaatcccagcacttggggaggctgaggtgggtggatcacttaagcccaggagtttgagaccagcctgggcaacatggcgaaacctcatctctatgaaaaatacaaaaaattagccaggaatggtggcgtgtgcctgtagtcccagctacttttagggggctgaggcaggagaatcacttgaactcaggaggttgaggctgtagtgagcctagattgcaccactgcactccagcctggatgacaaagtgagatactttaaaaaaaaatacataaataaataaaagctgctgtttccaatagacaaagactcctggttgaagtccttggtccttgggttctttgtcttctaggagcttacagtggaaacactcttttactcaattacagtttttaattagctgccttacaaggccattacaataatacaacatatatccttttaatacaatagattcacagtttcctggagacagtttcataggtctgcctgtttcaaacagagacagccagtatttatcaaaaaggattgatcttaggctaagcaaaaccagtggaagggcttttggcaaaggaattttaagagcctcagttaattttgccaatttagttttgattattctgtttgtgtgttccactaacccagattactggggagcaatatgcrtaatggaaatgttggaaaataggttagattttatatattgactggattatttgtctggtaagatgagtacccctgttgctatgaagttctagaggaactccccaatttgaaataattttccctaagaattttacttactgctaatgctgttgctcttctggatagaaatgcttctatcctatgagaaaatgtataattcattactagaatatacttgtatccttgtgatggtrgtagctgaataaaatataattgtcctaccttgaaggggctttcaggtagaggaaaatgaccttgattgctatgtaaaggtttccctggattatattttgggcagatgtgtcaatgattgtatatctatataccaatccacagttggggaaggcctccaataatactgttttccccaagtaatcattttattagggccccaatgagttaaatcatgtacataagttcagaaagttgactgtaatttggttggaagtatgggtcgatcatttggtccctaccatagcccagtcttggaggagtatgttttcccttttgtttcccaattttcttgttcttttttggagctttatgttgagctaattttatgtcaaaatcaaatgctttcttaaaagctaaaaaggggttgatttgcttattcaaatacacttagagcagccctttttactatattatctgctaaatgatgtactttgctttgtggaatgtctgactttgaatggcttcagatcttgataatggctaatgatttgggaaataatatggcttctaataattctgaagcatggtgtccatttttaatggactgatcagaagaggttaaaaatcctctttgttttctgggcatggtggctcacgcctgtaatcccaacactttgggaggccgaggcagtgaaacacaagagttcccttgacccctttgtgagactcatgaaggggtggcttgctttcttagcgtgcagctctgagcccttcatgggagtgggagcatgcaggtgagcagttgcaggagccagggcaaacaaatgctggaacsagccggccacttctctccagtgggagcaggtcctgtgcaggccccacagcaggatccaagtgtgttacaatgctcttttagctctgccatctggagggagtgccggctacccctagagccccagagggcatatcactagctcagtgggctttttgcctcattgtgaggggcagctgccctctgccagtgagggcaaagggccagtgtgacagcctttttgggttcctgcacccagtggtcctgaaatcttgtccaatgcccaagaggaatgaggtcayacagacttgaaggatggtgaatgcagagattttattgagcaatggaagtggctcttagtgtgctggggtgctggaaaggggatggagtgggaaagtggtcttcccctggagttcaggtgtcccaaccgaacacctctccgaccatccccagctgaactcctctctgactgtagtctctgatgttcagctacttcttctactctgaatgttcaggtgcttctctcttctgtgtgtccactgagtttggggtctggggttcttatgggcacaggatagggggtgtggtgggctaaaagagaacatttaggtggggaaatggggatgtgaagttctcatttagggctgcaggtccaggcttgagggtggaacctttgccagggaccccgcccttctatctagtatttccctgccttctgtccatatcaacaggaggatcacttgagcccaggagttcaagaccagtctgggcaacatagtgagaccctgtctcaaaaaaaaaaaattctctttgtttccataccactccaaagtcatgagctactctgacagcatatctgctgcctgtataaatattagcagttatttcttttgtccacgacaagttctaactaatgctattaactctgcttgttgagctgaggttgcttttggaagacgagaactttctgtttcctcagttaagatactgtagcataatctggtccggtgcggtggctcatgcctgtaatcccatcagtttgggaggctgaggtgggtggatcacctgaggtcaggagttcgagaccagcctggccaacatggtgaaaccctgtctgtaataaaaatacaaaaattagccaggtgtggtggcttgcgcctgtaagtccagcttctcagaagcctgaggcaggagaattgcttgaacctggcagatggaggttgcagtgagctgagattgtgccactgcactccagcctgggcgacagagcgagactccatctcaaagaaaaaaaatgatggctgggcgcagtggctcacgcctgtaatcccagcactttgagaggcagaggtgggtggatcaggaggtcaggtgttcaagaccagcctgaccaacatggtgaaaccccatctctactgaaaatacaaaaattagccgggtgtggtggcaggcgcctgtagtcccagctactagggaggctgaggcaggataattgcttgaactcgggaggcggaggttgcagtgggccaagactgtaccactgcactccagcctgagtgacagagcaaaactccatctcgaaaaacaacaacaaaaaagataatctagcatgatctgcaaaataaattccagattcatccttcaagtaagatccatctgtaaatcaaacaacatcagtgtttagtgaagggaatttcttgcaggtccatcctatgagggagaagttggtcagttaagattatgcaatcctgggccaggtgccgtggctcacgcctgtaatcccagcactttgggaggccgaggcagatggatcacgaggtcagagatcgagaccatcctggccaacgtggtgaaacccagtctctactaaaaatacaaaaattagctgggcgtggtggcaggcgcctgtagtcccagctacttgggaagctgaggcaggagaattgcttgaaccagggaggcggaggttgcagtgagcaagatcgtgccactgcactccagcctggtgacagagtgagactctgtctccaaaacaaaaacaaaaacaaaaaagattatgcaatcctgggccagccatggtggctcatgcctgtaatcccagcacttggggaggcagaggtgaggcgggaagatcatttgagcccagagtttcagaccagcctgggcaacatggcgaaacccgtctctacaaaaattcaccaggtatgatggtgcacacttgtagttcgatttactcagaaggctgaggcaggaggattgcttaagcctggaaggttgaggctgcagtgagccatgattgcagccactgctctccagactgggtgacagaaggagaccctgtctcaaaaaacaaacaaacaaacaaaagtttctttgtcagttttcaaatagtttatctcccctttttagactatcagtctcttgattagctattctattgtggtaaatagttgttagstagacaacagcaaatctgcactttcaaaggcatgattgttaggtgaaaatttacatccctaggcacagaatttagatctaaacagcattatttgctgagacaaagaaggccataggtaaagggccaccagacaagacaagattgccaggtagttttaaacagaggtaagatttcttatgtaaactttaagccagtgtcttccccatcatatttcttgtggtttagatgcagagagggagattttctttataaatgcagatctctttcacaaagagtgtctaaatagccagctaaatgccagaaagttgtattttggagaccaatctagttagataggcagccttttcaagttagcttttttcttgattagattactaacttcagggtggagcccttggatgaataggtcaaagaaagcatgcagtttataggacatatatttaaatatgtgaaaattagacacagctggaaggcagaacacgtagattccctcaaatcaaggagctcatttttacattgaatcctaggtcttcaaaactagggaaatgccacaggattggacagtgcaatgcttctacagtgccccttgctgcaaggacgttcccccaagactggtgggtaacccaacattaatcagctactctgtgatcagcccatcctccatgggagtcttacgccttagcggcaactgtttccatagaccctaagggtcaaaaccactcttttcttatctatatgcaggaagaaatgagtagtctcctacagtaataaccactcattgtaaatgctgtcattgtaaatgctgtcaactacctccatagctgcagtcctcaccagagactttcagctattgcacactcaaaggtcatgttctctcatagtacaaaataatccctggtatccccaaaagccaaagagataagggagagagagcagatctttagacctgagaaaaaccttccataggttttgggactccacaaagaaagcaaaagatcccaaaaggtgggtgttcagtacctttttctatgttccttaaggggtctcaggaccactagaagtctcctctagatttcttcatttgatatcaaagatgacaaaaggaaggaggaacagaagtagaaggaaatggataaataaatcttagaggagccaaattggggggattttattttttcttttttgagatggagtctcattctgtcacccaggctggagtgcagtggtatgatctcggctcactgcaacctccatctcctgggctcaagcagttctcctgcctcagccccctgagtagctgggattacaggcatgtgccgccacacccagctaatgtttgtatttttagtagagaaggggtttcaccatgttggtcaggcggtctcgaactcctgacctcatgatctgcctgccttggcctcccaaagtgctgggattacaggcatgagccatcgcgccctgcctggattttaagcttttcaaaacgcaaaaatcatgttactcaaaattgttactaccagatgttgaagaatagctatattattaattgctattagattctgtacaaatttctaacctctaccattagattttcttatgggaaggattagagtgttacaggggcttgtacaaggaataatcaagcctctttttatagaatccaaaactacagctcttactccctccaaggccttcaatcttagagggtattgcttaaggtttgggacaggttttgatggatctatctggattttgactggaggagctaagataattttcctcatatcagtggagaattttgactacagctaattaggcactacttttaagagcgcttctagttctttattatttaacaattcagtatcctctatggcaatataaattgcaattaaaaggatcagatttggaaaaatttttgtatctcacaattttgttttaccttctaattctaaatacacttcccccttttgagaagagtatggctattatataatttaaaacatttctccttatcaaatgcatgggggctgagggaactaagaggaaaacatgtgttccctctagggaacctaactgaaaaactataggttgagattgatatgctgttataggagtatttgttacacccaccatctgtaatggtttttgactccaaggaataagactctgtaagaaggtgggatttattattgataatgcagctctggtgtcattaagagcttgtgtttggggccaggcgcagtggttcatgyctataatcccagcactttgggatgccaagatgggtcgactgcttgagttcaagagtttaagaccagcctgggcagcaaggcaaaaccctgtctctacaaaacatacaaaaatcagccagccatggtggtgcacacctgcagtcccagcaactcaggaggctcaggcttgagttagggaggcagaggttgcagtgagccaagattgcactactgcaattcagcctgggtgacagaatgagaccctgtctcaatacaaaacaaaaacaaaaacaacgtaggccctcgctaacaatatttttcaaaaaaaaattttttttaatttttaaagagcttggtttgttttccatttaaagttatttcagttactcctaaggtattagtgagaagagggaagttccctcttttgatttcctcagggcactcctattcttccttttctttggactgttttcattctttccattttaattttctacaatcctttttgaaatgtccaggctttttttttttttttgcagtcattgcaatgcaggagattgggtcagttttggagtttaaaaaggctttttaggggttttaattggttggacaattgttttaattgtaaactcataaccttatttggttttcttccctgtttaacttctctttccttttcttccttggttagggtatgggacctaggtcccatagggtatgggtacgttcagcaaaataaactagataatgagtttgaggataactaactggtgcattgtttctttattataattgctaattcttaatctaatccatttataaagtttaagttacaaggccaggcactatggctcacatctgtaatcccagcactttgggaggccaaggtgggcagatcacctgaggtcaagagtttaagaccagcctggccaacacagcaaaaccttgtctttactaaaaatacaaaaaaaattagccaggcatggtggcgtgtacctgtagtcccagctactcaggaggctgaagcatgagaatcacttgaacccgggaggcagagattgtggtgagccaagattgtgccattgcacaccagcctgggtgacagagtgggactccgtctcaacaacaaaagtttaagttataggaagtatcattttggtggttagtataactttattmtgataggcctgaatattttttaatgttttttccccaaatctttcatagtgtgacatcaaaggcttgatatagtttggatatttgtcctgtccgaatttcatgttgaaatttgatccccagcgttggagggacctagtgggagatgtttggctcatgggggcagatcattcgtgagtggcttggtgccatcctcacagtaatgaatgagttctcattctattggttcccatgagagctgattgttaaaaagagcctggcacctcccctcaatttcttcctctcttgccatgtgatctctgcacaccagctccccttctccttctgccatgggtggaagcagctggaggccttcaccagaggcaaatgctggcaccatgcttcttcttgtacagtcttcagaattgtgaaccaaataaacctcttttcttataaattacccagtctcaggtattcctttatagcaacacaaagacagactaagacaaggctcatgaaaattttgttgatgttgtattttgttccaatcaaccactttttgaaaaactaaggggatagcatctagtaaagctttggcagtgttgcaggcccattcacaatctgcttcagaacatttatggaagttctctgaagaatttctctaatgtgcctttgctatcctatttggctttatcaaagatgaacgaattgatataagtcagagaatctgggattgaaagtttgaatgtttaattcaaattctctagcaaatccaatagaatcctgaagaggattaggaaattatttaattatgcctttaagttctacctttgagcatggttgataaatcaagcaggttctcttctactagacacacagggtattccctaaatggagccagtacagcatctggaggaggaggaggaggaagggaaggtagtctgatagacaaggaagttctgacaatgagggacaaagagaagaaggagctgaaggagaagaagaaatgtcagggtttttcaattcaaaattattttagacaattttttcatttcctctttcaaagaaatggctttatcagaaagcttctaagtaccattgaaaatagctctcccagttattttgttttattttagagccagcttttattttggattcagggggtacctgtgtatgtttgttatatgggtatattgtgtgatgctgaggtttgtgggtacaaaggatcccattacccaggtagtgagcatagtacccaatatgtagttttttagcccttgcccacccccaagtagttcccagtgttaattttccttctgttatgtccatgtgtaccgatgcttagctcccacttataagtgagaacatgcagtatttggttttctgttcctgtgttaattcacttaggataatgagagctggatttttaaaaattgagtatgcagagaaactagtttaggtatttcaaaggtacccccattttggccactgtaatttggggtcattgcaaattatgcatgactaattttctaaatatttacatgaagatgtgccgtaagtattaaacatgaatccagcttacgtttctagtggtggatctcttcttcaggaggaatacttggttttagatgcatgattacccagactttagattttcctcttgaatgaccaaacaacttagataggagatattttggattaagtgtgccgcctgtgggaatagcccctcaaggtgtcacccttgtgttggtttttcccttttatgtgtcttggtgatcccaagaggcttgggtgcttaaggcagtaggtgatcagctgttatgtgtgttcatttaactttatggtttttgtttgtttgttttgctctgtcacccaggctagagtgcagtggtgtgattacagctcactgcagcctcgaattcctggtctcaagtgatcctcccttatttcagcctcccaagtagctgggactacaggtgcacaccaccacatctggctaatttcttatatattttttgtagagatggagtctcactgtgttgcccaggttagtcctaaactcctgggttcaagtgatccttctgccttggcctcccaaagtgctgggattataggcattgagcctccgtgcctggctctgtatgctcttcttaagggatttcctgtaagactgtttcatgtcatgaacaatgagctccaacactcccacaaagacctcgggtagcctaaggtgcctttcagttggcaagaacagtgtctctcatctttgggacttattttgtcctcataaagagccttttgtagttttaattactcaagaagaaactttaggccaggcacagtggctcacacctgtaatctcagcactttgggaggctgagatgggtggattgcttgagcctaggagtttgagatcagactggacaatatggcaaaactccgtctctacaaacaatacaaaaaattagccaggtgtgggggcgcacacctgtagttccacctatttgggagactgaggtgagtgaatcatttggacctcggaagttgaggcttcagtgagccatgatcatcgatactgcactccagcctgggcaacaaagggagaccctgtctcaaaaaaaaaaaaagaagaagaagaagaatatttatatttgtcagttgtcagttgaactgagcttcagaatctggttagttttaaagattacaaattttgcttaagtcacaaagattcatttcctcttttcaaagataaactgttttctccctgaccaaagtttcaaatgagataaaaagttatagaaatgctaatgaggctgggcgtggtggctcacgcctgtaatcccagcactttgggaggctgaggcaggcagatcacctgaggtcaggagtttgagaccagcctggccaacacagtgaaaccctgtctctactaaaaatacaaaattagctgggcatggtggcacgcacctgtaatcccagctactccagaggctgagacaggagaattgcttgaacccaggaggcggaggttgcagtgagccgagattgcaccactgcactccagcctgggccataaagtgagaggctgtctcaaaaaataagtaaaaggaaaataaataaataacaaaataatgtttaaacctctaccaagctgggaggttcagaccctgagagatgccttactagatatttccattaacttcagcaagattgggtgaatgaaagtaatttgtgttggtagcagcgttccagttgtcagcaaagtgacagatatcactggaggtctgctttgagtcccttcatggtgaccaaaatgtcaaccttaaataatgagattcagaaaatatgataaaatatagggtttatttaaacacaaagtatgatctgatcactgtccatttgtttttgtgggctggttgctgaagggtcagagttctgtcttcatgtatagtctggtcattgtccatttgtatatcctccagtcccttgctactaaaaacaaaaatgacagccacctgggaaacacagaccccaaacacgtgggagcaagtgttccaaagtggggaagttgagtttccatttatataggcagttaacagggttgtaacatttttccatacaaggtcagtccatatgttatatgttatagtttgttacatttcaaggaagtgattggttacagtttgttacatttcaaggaagactgccttaacattcagtgatcggggtgataatttgaagagatcttgagctacaaggcttttcctagtcatttacagtaaaagcagaacttgcagcggcatgctactggctcaggtcatagaaccacattcctctcaaggctcaaaattatctaaaattctgccagctttaaatttgaattactcagtttcacaccatcataggcctaagctcacattttattcaaaacaacttcaatgtagtatagataaattttcataactctttgtaagttgatatgatttatctctttaatattaacgaaatttaggaattaccttctgatgtttgctgcatatatatgcacagattgatggcaaatattttattgcactatttagttctgtattatactatcaacattactgtttttctaaaataaagcagaatcttttctttgttttaaaatgatctcagttcccaaggaagaaactacaccaatttgagtctgaaatatcaaacattgaagaatacaaaatttattttctaagcagtgaaaaaccatgtatctaatgaagcaagttggttcagatggtgtagctggcaaacaggacaagagctacgtagaggtagcaagactgaaacttgatcttggttggaatggaacaaaatgytcatagtattattattattattattattattattattattattattattattattttcgagtcagggtctcactttgtcacccaggctggagtgcagtggcacaatcatagctcactgcagccttgatctcccaggctcaagtgatcctcctgcctcagcacccccaagtagctgggactacaggtccgcactaccatgcccagctaatttttttttttttttttgtagagatgggattttgccatgatggccaggctggtcttgaactctgagcttaagtgatctgcccaccttagccccccaaagggctaagattataggagtgaaccaccgtgcccggcctagtgttaattttctttttgcatgatttttacactactatgaaaataagcaaagtccacccaaatgagaaccaacagaattcatttattgaaatcttgctataacaaggaagtcagccaacatcgctttcgttgggcagactcaaaaacgagtaggcaagttttatagtgaaaaaaatacgttaaggtatgatctaattggaggttgttggcatggrgaagttgaaggccagctatctaaaagcagagcatcttagggaattaattcaggaaacatagttggctttctgtggttggccttgagttgaaatcatgcaggggttggggcacaaaaatagagaagctggtagtcattgatcaaatcctcgctgtcctggggtgattgctgccaagattgtaatttggatttgcaggctggttgctgaagagattgtaggtcagagttctatcttcatgtatggtctggtcattgtccatttatatatcttctaatctctcactactgaagaacaaataaaaatgatttgtgttttataattttatggaagaatatattcatgtagctttgagagatttgaagattctaatagttacagaaatcttcccagatgaaaattatattttatgtctgagaatataagatgaattatgtttatactgtaagatatctttgcaaagttcttgttacagtagaagtagattctggacctcaaagatatatcagttacaataataatatgtacttatggggtcttttgagaaattataacctggtttgtactacctcagaaagattgagcattttctccatgacttattggataattgggacttttaaagatgtaagaaagaaagttactggtatatcaccactggaaactcctcacattgcaattttctatagaggaaatttgttggctgtgatgaatattatatttaagtttctacagttttttaaattaaatttttattttgagaaattttcaaacagaaatattttatataaaaattatacagcatcaatagataaagctgaagtatcctttatcctctcccctcctgccccattttctgtcccctttcttcctgtaagaggcaacctctcatgaatttggtgtgtgtccttttaactcataaaatcattatttctaaaaacaatgtaattgcccttacttggctaattataaacacaaatatggaagttttgaaagacttactttctagattcttttagattagtaaattattataataagcctgaaaaacagaacattattcaccaagtaattcaaccaagtaacatatattctgtgttaaatagcatattgtctttgtattggtattaatgtatctaattagtggcaggcatctaggtctctcaaggaaggaagaaggagaatttggggaaaagaaccaatgaaagaaagcacagattgacactttgagaaatgtgtaaaaaatgagtcagaggtttttctcttgatcttggctgaaagtatagctaggtctcaagtttgctttgatctttttttgcctggcccttacagaagcaatgctttttctttgtttcaaaatgaatgggcaaatatatatactatacttgtcaatctcagtgttttaagtattgccaatttgacaccaatgtggcagaaccaagttcaatttgttaagagtttaatttattctccaaatataagttgcttctgttttataaatacctacataaaaagcttaagtcccagcaataatttaataaaatcctatgcatcttgttttaaatactcctgtgattcacagacaatcacagttgactgaacaaaaacctatatttagtaactatttgaaaggtactgtaattaagtctgttttagttctaatcattactaacactgtggataatgcaggaaagggggaaaacacagctcatcaaagaagagacccatgagatggatatagctagtttaatcatagtaaaaaaatcccaaggatgttgacacatctgtactatcattaatgagagatatagtacaaagacttcatctgaaaaggatgacttcatggagtatcaatgactttacatctcttcaaaggataaaaagggtttatgtttttctggtgcctgaatgttttaacttgttacattgactgcatgatgagtactatggtttgtgatttaaatgtattatgaacataattttttctttgcatctaaaattttgtttttggcttaaggaagaacccaaaatgctattcattcactggtagtatatctgtgatttgtagcatgttctataaaatttcatctccaaggataaaaattttcttatatttgtacataaataaaacttttgtgagcttgattaatttttaaaggagttatacttttgttatccttaacttttaaattggagtattttctttgtattaataggcagaagactatagccttaattttatcagtaggttaggaagcattttcctatatttaatctctatattgctttcagtttttggctttcttgargataamcaaaatgtcaattactagggaattctacaatctgagagtgataatttgaaatctgttataatgacataaagatttattttttgatatttttataggaaatggaaatactggcaaactaaaaatatttgtttatggctacttgttatttctaatcctcttcctaaaatgtaaggaattaaaacttgaaaatttatttatggaatggtaaattagaaactgatagtaaatcagaagactgacgataattaaaacattataatattgggaaagtagctaaagaagaccttggaaaattattattagatgtcttcaggaagtggctgtaaaaaatatacctgtcagttgacaaatgtgcattttattttattttttttttgagacggagtctggccctgtccgccaggctggagtgcagtggcgcgatctcggctcactgcaagctccgcctcccggtttggggccattctcctgcctcagcctcccgagtagctgggactacaggcacccgccaccacgcccagctaattttttgtattttcagtagagacaaggtttcaccgtgttagccaggatggtttcaatctgctgacctcgtgatccgcccgcctcggcctcccaaagtgctgggattacaggcgtgagccaccgcgcctggccaaatgcgcatgttaaattaaatagttaacttattatttctaaaatctatggcgtttgaatttaagatgacgtttcaaatagacataaaatgttttgctttaagattttacaatataatacaactatttgcatagccaacataggtagccttggtacctcattaggtaaagtggagttttttcctcattgttaatgaaaaggataaggttccstaaaagagagcaaaaaggaaaataagatattgcttttaaaattctcttctttaattcctgtttttcagaggatagctggctcacatattatgtttctaaatttatcagttccccgccaatgagacaaatacatctttacaaagatttatagattgctaggagttttctggtccatatttacaaaaaaccctcaatttctaaacaaattatattctaaaagtttgttttaaaatgtattttagaatttttgatatattttttccatagaaagagttataaatggtaggttcctaggccagtccacagaagtatttttaatccataaagtagtgaggaataaagatttgttttaaatatttttatattgaatttaatgctggcaatttaaggaaagcagttagtttgaatcacaggattgggaaacttgtatggaaattctaaaaaggacttatggatacattaaaattggcttcagaaactatttctaattttttgtctaaactccccactatcttttgcaaatgcactactattcttgggattaatagctcacaaatggaacaatgagagaaattttctttgagtggttaggtgtagctgaaagagggattatggtaagaggatccataaataataaaaatttgatatgtgatttatatctcagtgaagctgttctttaaaaagtaaaaaaaaaaaattatggttctgtttaaaaagaaaaaagtgaaaaataaaaataagaaaataaaagcgtgaaagaggaaataacttcttgtgactaaacttccaaataacaaaagaaagagtggctttacattacttagttgtttgtatttgttatgataaatgtcaagtaagccattaatttttactaaattcagtaaaaaaccttaatctgacagctagggaaagaaacaaatggcaaatatagagtagatgatcttttttttgttttttctttttatgagatgaagtttcgttcttgttgcccaagctggagtgcagtggcgccatctcggttcactgcaacctccacctcccgggttcaagggattctcctgcctcagcctcccgagtagctgggattacaggcacgtgccaccacacctggctaattttttgtatttttagtagaaatggggtttcactatgttagccaggctggtcttgaactcctgacctcaggtgatctgcccaccttggcctcccaaagtgctgggattacaggcgtgagccaccacgcnnnnnnnnnnnnnnnnnnnnnnnnnnnnnnnnnnnnnnnnnnnnnnnnnnnnnnnnnnnnnnnnnnnnnnnnnnnnnnnnnnnnnnnnnnnnnnnnnnnnnnnnnnnnnnnnnnnnnnnnnnnnnnnnnnnnnnnnnnnnnnnnnnnnnnnnnnnnnnnnnnnnnnnnnnnnnnnnnnnnnnnnnnnnnnnnnnnnnnnnnnnnnnnnnnnnnnnnnnnnnnnnnnnnnnnnnnnnnnnnnnnnnnnnnnnnnnnnnnnnnnnnnnnnnnnnnnnnnnnnnnnnnnnnnnnnnnnnnnnnnnnnnnnnnnnnnnnnnnnnnnnnnnnnnnnnnnnnnnnnnnnnnnnnnnnnnnnnnnnnnnnnnnnnnnnnnnnnnnnnnnnnnnnnnnnnnnngaatttggcagttaggaggcattttagtctttagactactcagtttactctatattgactagaatttttagtgaaggatcttaatctcatagtctatgtcacaaaatgtacatcacagcgttttttcacagaattaggaacacatacattatttttaataactttgaagcaaaaggctacttggagtgcattatctccacatacatatatataatatttataatattttatatatataaaagacatggtctcactatgtttccaggttgaacttgatcaaactcctggactcaagcaatcctgctacctcagcttctacgggtgtgtaccactgtgcttggccaattgtttactctgtatttttcaccatgaagttaaaacctaaaattaggatatcatttaggaaaaaaagattaggtgctgagattaacttttttttttttttttttttttttttgagacagagtctcgctctgtcgcccaggctggagtgcggtgatgcttgtcggctcactgcaagctccgcctcccgggttcacgccattctcctgcctccgcctcctgagtagccgggactacaggcgcccaccaccacgcctggctaatttttttgtatttttagtagagacggggtttcaccatgttagccaggatggtctcaatctcctgacctcgtgatccacccgcctcggcctcccaaagtggtgggattacaggcgtgagccaccgtgcccggcgagattaacttttaaaatatttgggcttcaactttattcccacacacatttccagaacccttgggctttggaggagtggcaaaactccacttccatcctcttagggtcccagctgggtctgagaattaaattgacataagacattaacaggagaaaaacatacaaatgtatttaatacaaatttcacayggcatgggagccctcgtaaggaactgaagacccaaagaagcagttacagtcaatcactggtatactgaattggacaaaaaagtagctgtgaaaaagcagctaaattgtgtggggaggcttaaaagataacagttattttaacaaggtctgtacagaattcctttggtctcaacttcatccttgaggataaggatgttttattccttttggtatagggagggtgtctttcacatgggaatttcatctcctgcttttaagaaacagaaaagaggctagaaggatctttttgcacctgctgcttttcaagtgcctttaattcaaaatagtcaatatgtcagagtggtatatttttaactccttcagcttaaatggaagattcatgttttcttgaaaggattaggaatatgaagtttcctgcagaattttacaccaaagatgtataaacataagaactttaccagaatagggcagtgagagtctgaaacaatctttcagggaaaatctgacgatatctcctgaacatgtatgtaatcttttggctagactcacagacttcctaaaaagtatgatggtaaggagaaaaatttttcttctgattctgttgtgaaagagtttgtttgtttgtttgtttgtttgtttgttttcttttgagacaggatcttactctgtcgcccaggctggagtgcagtgacacgatctcggctcactgcagcctcgacatccagggctaaagtgatcatcccacctcagtctcctgggtagctgggaccatgggcacatgccaccactgctagctaattttttttggtatattttgtagagatggggttttgccgtattgcccaggctggtctcaaactcctgagctcaagcaatttttttttaaactggtgatggttcacaacttgtgatacctaagtttgtgtatatatcaataatatatataaacaacatgcaatattcatttcctgtatattttattctatgttaagttttttggaggtaactttgtctactcagcaagtagaatgttacgcagcaagtaaagtcattattgttttgtttagtcttgctttgtttttgcaatcctaattaaggataatattcacttcccatccagagagtataccaatcctttttattctgcttttcactttcccgtttccttctttttctttctcttttaaaacttacacaaatgtcatacatgaaaacactgccattgcaaaaacttccagaaatagaaatacagaaggctgggcgcagtggctcatccctgtaatcgcagcactttggaggctgaggcaggtggatcgccttgagcccaggagtttgagaccagtccaggcaacatggcaaaatcttgtctctttaaaaaatacaaaaattggccgggcgtggtggctcacgcctgtaatcccagcactttagaaggccgaggtgagtggatcacaaggtcaggagttcaagaccagcctggctaagatggtgaaaccctgtctctactaaaaatacaaaaaattagcccgggtgtggtggcgagtgcctgtaatcccagctacttgggaggctgaggcagaaaattgcctgaacccggnnnnnnnnnnnnnnnnnnnnnnnnnnnnnnnnnnnnnnnnnnnnnnnnnnnnnnnnnnnnnnnnnnnnnnnnnnnnnnnnnnnnnnnnnnnnnnnnnnnnnnnnnnnnnnnnnnnnnnnnnnnnnnnnnnnnnnnnnnnnnnnnnnnnnnnnnnnnnnnnnnnnnnnnnnnnnnnnnnnnnnnnnnnnnnnnnnnnnnnnnnnnnnnnnnnnnnnnnnnnnnnnnnnnnnnnnnnnnnnnnnnnnnnnnnnnnnnnnnnnnnnnnnnnnnnnnnnnnnnnnnnnnnnnnnttgtaatcccagcactttggaatactgaggcagttggatgacttgagccccaggagtttgagaccagcctgggcaacatggtgaaaccctgtctcttcaaaaaaaaaaaaaaaaaaaaaaaattagccgggcttggtggcctgtgcctgtagtcccagctacttgggaggctgaggtggaagtatcacctgatcccagggaggttgaggctgcagtgagccattatcatgtcactgcactatggccagggtgacacagtgagacccagtctcaaagcaaaaaaaagaaaagaaagaagtacaataaaaagcagtgttacctttttcctttcctcttctatcttattcccctctccagaaatcactactttgatgtttcattcaaaatctttttctgtttatttacatactatttctatataaagaaacatggtttgcagggaattttcctccttttatataagtagggtcatactgtctatatttttagcaacttgcattttttttttgagacggagttttgctcttgtcacccaggctggagtgcaatggtgccatcccggctcactgcaacgtctgcttccttggttcaaacgattcttctgcctcagcctctcgagtagctgggattacaagtgcgtgccaccacgcctggctaatttttgtatttttagtagagacagggtttcaccatgttggccaggctggtctcaaactcctgacctcaagtgatccgctcacctcagcctcccaaagtgctgggattacaggtgtgagccaccgagcctggcctgcattgtttttcagttaatgaaatgtagaggtctttccgtagcaatactactatttaactacaataaccacttcataatgttccacagaggtttatttaaccatactgaactgatgggcagttaaggttttatgtctgtcatcaaaattctcagattttctcctctcctattttttctgtttttctgttttattctgttctgtctgagatttcctcaactttgtccttctcttaaggttttcatttttgttattactttcttttttttttttttttttttgagatggagttttgctcttgtcacccaggctggagtgcagtggtgtgatctcagctcactgcaacctccacctcacgggttcaagcaattcttctgcctcagcctcccaaactagctgggattacaggcgcctgccaccacgcccagctaatttttttgtgtttttagttgagacggagtttcaccatgttggccagggctggtcttgaactcctgacctcaggtgatccacctgccttggcctcccaaagtgctggattacaggtgtgagccaccgcgcccggcctgttattacatttttaatttatgtaagtttttctgtgtgtgctgaatgttttttaaaagttttgtttgttacagttatctcttggaaataatttttttcctaatgttttcttctgctggcatagtttctttctaccagattgctttcttttcttttgttaattttagtctctattttccaaatacaggctttctttaggtatctagtaattcttcgctgcctgttcttttttttttttttttttgagacggagtctcgctctgtcgcccaggctggagtgcagtggcgcgatctcggctcactgcaagctccgcctcccgggttcacgccattctcctgcctcagcctcccgcgtagctgggactacaggcgcccgccaccacgcccggctaatttttttgtgttttttagtagagacggggtttcactgtgttagccaggatggtctcgatctcctgacctcgtgatccgcccgcctcggcctcccaaagtgctgggattacaggcgtgagccaccgcgcccggcccgctgcctgttcttaaataagaataggtgaataaaagccaattgggaagcctaagtacatgggatggggcttgtagattttcagttttannnnnnnnnnnnnnnnnnnnnnnnnnnnnnnnnnnnnnnnnnnnnnnnnnnnnnnnnnnnnnnnnnnnnnnnnnnnnnnnnnnnnnnnnnnnnnnnnnnnnnnnnnnnnnnnnnnnnnnnnnnnnnnnnncacttagtctccttgtttttcagaagatacctgcgtcctctactgtacctggtgtcctctaatctccagtaaaataagctgcagacttctgccatgattgagttattagggagagatggtcacctggagatgtggaatggaggaaggaaatctaaggatctaacagcttcttaaatatctttcatccaatttttcttattttatccattccactcccaacttacccccagttccacaggtccatagtcttgccaattcttatgcctttagaaaattctgtggtatatattgctttcctcactgccagtttaggacttggctcattcagctttcctcactgccagtttaggacttggctctctttggtcggctaagtcagttaccactctgtcatctactttctgatttacaaaaatctgttgctttttttcttcttctcttttcctccttatcctttgggattatgtattttaaaatttgccttaatttttgtcttagtagggtttctgaaaggagtacattgaatattaatattagatctgccctcttatcctgggagtctcttatgttatttctttgatagagagactgcagtacatagtagttgagagtgtgagttatagcaccagactgcttgggtttgaactctgagtctgccacttactagctattagattaatctctacattcctattttcctcatctgtaacatgggggataatacttcctttgtagggtgaccagagaattaattaattagttaattaaaattaacttatgtaaaggacttagagcaatgccttgcacatagtatacccttaatgaatattcattatcaatattatcttccctctcttttctctgtcttattttcctagaactcctgttagtaaaatattaatctccttagatttatccttgaagtatcttatttttctttcatacttttcatctcatgtgtagttatactttcctgggaattcttgtaacctctgcttaatgtcttattttaacaatcttattttatttatttttttgagatggagtcttgctcttttgcccaggccggagtgcagtggcgtgatctcggctcactgcaacctctggctcccaggttcaagtgattctcttgcctcagcctcctgagtagctgggattaaaggcacttgccaccacgcctggctaatttttgtatttttagtacaggtggggtttcaccatgttggccaggctggtctcaaactcctgacctcaggtgatctgcccgccttgccctcccaaagtgttgggattacaggcatgagccaccgtgcccagccaacaatcttattttaaatatcaaacagttcttttgacatctgattttaatctttcatgttaagggattttctcacatgtccgatgacctttggtagtttgtgcatatttattttaaattgattaaaagctctttaggaataaaactaattgtggagtaagtaaggaataagccttacttttgggtgttaggatggacataattattattatgaagaggatcttttctctcagattgtgcaatgcctccaaaaagactttcaatttctcgcctgggcaataaagtggaagtgtttcgggtcagtggtggggtggagtgggagagtgggtaggggaattaagtcccaccctttggtatttcaagaaatccatttgttttctatctatctgtcctacgtctactctattttgcctagtgtcctcatgtctggaatacccctcttcaatttctcaagaggatacactgccattctccaaccaagtcaggggtgtatacacttagctgctagcattctacacatgggagtagggaggagaatcaactgttcacatacacagacttttatcctggtttttcactttgtgcttcctcactacccactgggtacttccaaggtcagaggttttcccagattctttgggggtgaattggctttcttctcaccaatgtccccctttgtaatttcctgagattatagcttcctccactataacaagtcagataccactcctccatttgttctcccttttctaaaaatatgttatccactgtaaaacatgctatgtactccctcttctatttgattgtccttgaggatttaaaccttttaaattatgttgccatcattttattaggggagcagagaaatacatatgcttgatcttccttttctttttgacagaagtcatcagatgaatgttattttaaaatattattgcatttaactatactatttaattatataatgagctggcattccctagtacacctggaaaaagtagtccagatttgttcatatagatgtagagtttggctgccatgaccacaccctcctctttataacaagcaagtggtagtgaacaaactcaggtcacaggatccaatggaaagagtttgaattcccatagccggggcaggttcctttacctatggttaatgttctagagcttgactttccccatctctgctagaaacagactttactcagccacaattccattttcttttatttccccttttgcctttactagcttgaattactggcattaactgaggattcttcttctctgacatacaagaaagataaggtccatttggtacactctgaacatccatacagtggaatactactaagcaattaaaaagaacaaatgatgcatgctttaacatctgtgaacttcagaaacattacgctaagtgaaagagccacatgcaaaagattacatatgaaaggttgagaaagagcatatctatggagatagaaagcaagttagtagttgcctgaggctgggatgcctagtggtggggagactgtgcatgtgtaggggcaaagagyatatgggaactctctgtacttcttcagttttgctgtgaacctaaaactgctcttaaaaagtctattaaaaatatattttaaaatgtcctcaaataggaattacactttaaattataaaaatgttagcactgcatatataaagctctgtgcatcctaggtagcaaatttaaacaaaattactatagcatttaattattaatttattgggatttaggtttattgacctcatacctcataagtgaggccttcttctttttttttttttttttttttgagatgtagtctnnnnnnnnnnnnnnnnnnnnnnnnnnnnnnnnnnnnnnnnnnnnnnnnnnnnnnnnnnnnnnnnnnnnnnnnnnnnnnnnnnnnnnnnnnnnnnnnnnnnnnnnnnnnnnnnnnnnnnnnnnnnnnnnnnnnnnnnnnnnnnnnnnnnnnnnnnnnnnnnnnnnnnnnnnnnnnnnnnnnnnnnnnnnnnnnnnnnnnnnnnnnnnnnnnnnnnnnnnnnnnnnnnnnnnnnnnnnntccagcaggtttgaggaatgacagagaagatttgtgtgacttggaacaaaaagtgaaagaatagtattacaaaacaaaatcagagagctggcagtgtattagatcaagtagggtcttgtaagccatggtccaggattttgaatttttccctgagtgagatgggaaggctgagcagaggaaggacatgatctgatttgcatttttaatggatcattctgggtgctgtgtggagactagagtaggaggaaagaatgtagaaaaggggaaagaattagtagtagttgtccaggtgagaaataatgatagcttagatcagggaagtagtcttgaggcagtaataagtggtcaggttctggatatattttgagagaagaagcaataggacttgtttatgtggtgtacgtgaagggaagaatcaaggaagsataaattcaatgattttgactagagcaactggaagaatggaattgccccttactaagatggagaagagcaagcttaaagggaaaaatcaagagattggttttagacacttaagattacctgttcaagtggaaatattgagcatgtatggttagatgtaagaacctgaagttcagaagagaggtatgactggaagatacaaatttaagcattggctgtaagtaaatggtatccatggaactggctttacaattacgcactatacatacaatgaaaacttcgtctgtttttttttctttttccttgcattatggaatattgatgtcttgttcccttttggactcttctctcttttttttttttttttttttgagacagagtcttgttctgtcatccaggctagagtgcagaggctcaatcttggctcactgcaacctccacctcctgattcaagtgattctcctgcctcagcctcccgaatagctgggattacaggtgcccaccactgcgcctggctaatttttgtatttttagtagagacggggtttcttcatcttggccaggctggtctcaaactcctgacctttctacttgccttggcctcccaaagtgctgggattacaggcgtgagccaccacacccggccaggactcttctctttaaacaatgatttttcaccttcatttatttcctgttttaaaatagaatttgaaatcagcagaaaacttttggcattgtcaacctcatcagtttctgcaaattatcttccaaaactacaaatggatatttaaaattcataatatgtagctcttaattattagatagttgaatgtcatttaagaggtgcaggccattcagcaagagatagaaaaagtgtcattatgaatttaaaatttaacattttagacaggtatggatttatggcatcattctcaatcatgacttcagggtctatgtgttctcttaggttcatttctttaattttctctattttaatgtaaaggaaatgtgaaaatttgaattacattcttcaaagttattagaatcattataacaggaagtgttaatgttaaaaagtctttatcaagacctaatattaaattatataacttgcttgttctacttttctataaaggttaaccttataccaacttaactgcttaaggatattacctgcttctttttcattataatgagcaaatctgtgtgtgggagttcatacagtatttgttcattggaatcactttcagaaaatgacagttcagttctgttaattgattgaagaaagctttttaaaaatcattttaggccaggtgcggtggctcacacctgtaatcccagcactttgggaggctgaggcrggcgaatcacgaggtcaggagttcaagaccagcttggccaacatggtgaaaccccatctctactaaaaatacaaaaaataactgggcgtggtggcacatgcttgtaatcccagctacttgggagggtgaggcaggagaatcgcttgaacccaggaggcggaggttgcagtgagccgagaccgtgccactgcactgcagcctggcaatagatcgagactccgtctcaagaaaaaaaaaaattattttagatttttttctactgcagtttttaccatactgcttttgacactatccacaattatacttagtagaaatgctaaattggtaaaattatgccacatctccttctgtaaatttctactctactcttatgtggttgcaagtacatagctatctttatgtgagatattactgcccttgctagaaacctcaaaatacctcataataccaagcttatttttaaagtgatggttttaaaggctatgcataataagcttcagttgtcttcagtatagttgattattcattacttattcagcatgaggtaatatgctatgtgtatctaatcaaagtaatcagtggtttctataaataaattgtagtcgaagaagcatgttaattagtaaataaacacacagttgcttctcaatttacattagttatgttccgtaaagttaccacaaacactgaatcagtgaatatagaagcattgctcctagaggaaatagagggttaggttcctgtgagcctctgttcatgacatttttatcaaccagtcaatacaaccttgttttatatgtgtttctgcttaaagataccgtattaaatatatattgttgattcattaacactgaactcaaggccaagagttaagattatttaacacaactatttttttcataaggcacctcataaccttcttatgtgtcagaacactagatagcatatcagcattatgcatggggaacgttgtaaacagcaaggttatcagcacaaagcataaaaatgcgaaaaacatagcgtgaaagagactgagaaaaggacgctgtgagagctaaaacaagaaggcaaaacaaacattactttgacctgagctgggaatgtgtgcttcaggtaactcaaatttttaccactctgtacatgtccatgaatgactgtgaaagtattgacttaggggttacaaataaattttagtgactatgtggatttgcaaatacagaccctgcatataatgaggatcaactgtatgtatgtgtgtatataaacatacacacatatatatatatacatgaatgttttttcattcctgcctggaatgcattttaatctcttttctatctgttgtattctcactattcagctcccagcttggatgttatcctatctcagaaacctttcccagctctcttaaatactcattgagtatgatctcatatccctgtgtacaygccttgtataatatttttcacattttgtgttaattctttaccaggattctttaaactgtgagctccataatggcaaggaccttttctcatttacctctgtattcttagtacttaacacagggactaacacacagttgaaattaaataatttttttttctttttttttgagacggaattttgctcttgttacccaggctgcagtgcaatggcgtaatctcagctcactgcaacctctgcctcacaggttcaagtgattctcctgcatcagcctcccaagtagctgggattacatgtaccaccacgcccagctaattttgtatttttagtaaagatggggtttctccatgttkgtcagggtggtctcaaaccccygacctcaggtgatctgcctgccttggcctcccaaagttttgggattacaggcatgagccactcgcacctggtgaaattaaataaattttaaatgaatgaatcaataagcctctctgcaaatggatttattattattattattattttgagatggagtcttgctctgttgcccaggctggagtgcagtgatgcagtctcggctcactgcaacttccacctcccgggttcaagcagttctcctgcctcagcctcctgagtagctggggttacaggtgcatgccaccatgcccagctaatttttgtatttttttagtagagacggggtttcaccatattggccaggctggtctcgaactcctgaccttgtcacccacccatctcaactgcccaaagtgttgggattacaggcatgagccaacgcgcctggctggatatatatcattttaatgagtctatcttaattcaaaattgcagactataggaaatggaaatgttacacattttataccagtaaatatctcatgatctctatttttgttggttctttttcctttggatgaagctgctctatttggaaaggaacatataatgaaccatataatcagtttttctattatgttttacatttttttctttttcttttttttttttttttttttttgagacagagtcttgctctgtcacccaggctggagggcagtggcgtgatctcagttcactgcaacctgcacctccccggttcaaatgattttcatgtctcagccacccaaatagctggaatcacaggcatgcgccaccatgcatggctaatttttgtatttttagtagagacagcattttgccatgttggccaggctggtctcaaactcctggactcaagtgatctgcctgccttggcctcccaaagtgctgggattacaggtgtgagccaccgtgcatggccatgttttacatctttctataaaacaaagacttagcacagaaatgcactaggctctgtaccaaactatacagattctaaactgcagaggagaaaatttatacttaggtaaaaattaggatacatgcttgtgttacattttaattttgaaatatttcaaggccggcatggtggctcatgcctataatcctagcaatttgggaggctgaagcaggaggattgcttgaggccatgagtttgagaccagctgggcaaacatagcaagacccccatctctacaaaaaatttaaagtagctaggaatgttggtgcatgcctatattcccagctactcaggaggctgaggcaacaggattgcctgagcccaataattggaggttgcagtaagccacgatcacaccactgcactccagcctgggtgacagagcaagagaaaccctgtctcaaaaaaataataataataaaatgataaaataataaataaatttctgcgctgcagaggacactgtcaggaaactgagaaggcaagctacagactgggagaaaatatttgcaaaagacatatctgataaaagcatgttagccaaaatatacaaagaactcttaaaacaataagaaaatggacaacccaatttaaacatgggcaaaagacctgaacacacactttaccaaagaagtacagacactttaccaaaacaaatttttatatggcaaataaacatatgaaaaaatgctcaacatcgatatgtgttagcaaattgaaacaataatgagataacactacacacctattagaatgataaaaatccaaaaccttgacaacaccaaatgctgacaaggatgcggagcaacaaaaactctcattcattgctggttggaagacaaaatggtacagccactttggaagaagtttggcaatttctcacaaaatgaaatgtactcttaccatatgatccagcaatcatattcattggtttttacccaaatgatttaaaaacttatgcccgcaaaaaatactgcacagaagtgcttatagcaactttattcataattatcacaacttggaagcaaccaagatgtcctttagtaggtgaatggataaacaaacggtggtgcatccagacaatggaatattatttagcactgaaaagaaatgagtcatcgagccatgaaagacatggagtaagcttaaatgcatattacttagtgaaagaagccaatttgaaaaggatgcctattgtatgattgcaactatataacatactggaaaaagacaaaactgtggagacaacaaacagatcagtggttttcaagtattgaggagagggatgagttggcagaacccagaggatttttagggcattgaagctattctgtagaatgctataaagatggatatatgttattatacatttatcaaaacccacagaacattcatcaagagtgaaccttagtgtaaactatggactttgggtaataatgatgtggaatttgggtcaatgtgtgttcattgattataacaaatgtaccactctgttatgggctgtcgatagggagggaggctggtgggtgtgtgggcacagggattatatgggaactctctgtactttatgcttaattttgctgtgaacctaagactgctcttaaagtctgtttttggccaggcatgatggctcatgcctataatcccagcactttgggaggctgaggtggaagaactcctgaagccaggagttcaagaccagcttgggcaacatagtgaaatcctgtttctgcaaaaataattttaaaaattagctggatgtggtggcaaacacctgtagtcccagctatttgggaggctgaagtggtaggatcccttgagctcaagagttcaagttgcagtgaaccatgatcacaccactgcactccaacttgggcaacagatcaagaccctgtctcaaaaaaaacaaaccagaaaaaccaccaaaaaacaaaaataaagtctatgtatttatttatttattttgagacagagtctcgctctgtcgctcaggctggagtacagtggtgcaatctcagctccctgcaacctccagctcctgggttcaagcaattctcgtgccgcagcctcccaagtagctgggattaacaggtttgcaccaccagacctggctaattttaatgaagtctattttttaaaaaattgattcaagaggcaaatttaataaaattagtgattattaccattttatcaagaatattcttaacattcttaagtgaagctggatttaaagcattttttttctgcaagtgaatgatagtaaaacatgccatgactgctagtatagtttggtgacactgcatggatttggatttgtgttcaggtgccagcagttttacccataattgattttgcaccatcagtgaaaatgtcaccacaataacttcttagtattattatgaaaatagttctgactattttcaagaaggatcttagggacccatagggctcccttcaggagcttcattgatctttcccatgtatattttccatatacacacacacatacatatacacacaaacacacatacacacattatttaaatatattaaaccattataattgtttaatgtttttttaataatatactccttattctttttacaacttatattttttgtatttgaaatttatttgaaatttattcgagttgatgtatttagctctagatcattcatttcaactgttctggagtaaaacattgtttgataatacagacattcctcattttattgtgctttgctttattgctcttcacagatgctacattttttcacagattcaaggtctgtggcaactctatgttcaacaagtccgttggcaccactttttcaacagcgtgtgatcacttcatgtctctgtcacattttggtaattcttgcaatatcccaaacttcttattattattatatctgttatggccatctgtagtcggtgatctttgatgttattattgtaattttggggggtggcaccacaaactgcacccatataagacagcgaacttaataaatattgtgtgttctgactgtttcaccaactggctgtttccccatccctctctcccctttccttgggtttctctgttccctgagacacaacactattgaaattaggccagttaataaccctacaatgggctaaacgttcaagtgaaaggaaaagtcacgtctctcactttaattcaaaagctagaaatgattaagtttagtgaggaaaacatgtcaaaatccaaaacaggccaaatgctagggctcttgcactaaagttacctgagttgtgaatgcaaaggaaaagttcttgaaaaaaattactccagtgagctcatgaatgataagaaagtgaaacaggccctgtgtgatggctcatgcctgtaattccaaaactttgggaggctgaagtgggaagatcacttgagcccaggagtttgtgaccagtgctggcaacagtgagacccccatctctacaaaaaataaaaataaaaaaatagatgagcatggtaacacatacctgtactctcagctactcgggaggcttaggtgggggtactgcttgagctgggagatcaagactaaagcgaaccatagcgacacgactgcacttcagcctgggtgacagagcgagaccgtgtctcaaaaaagaaaaggaggccgggcgcagtggctcacgcctgtaatcccagcactttgggaggctgaggtgggcatatcacgaggtcaggagatcgagaccatcctagctaacacggttaaaccccgtctctgctaaacatacaaaaaaaaaaaaaaaattagctgggtgtggtggcaggtacctgtagtcccagctacttgggaggctgaggcagaagaatggcatgaacctgggaggcggagcttgcagtgagccgagatcacaccactgcactccagcctgggtgacagagcaagactctgtctcaaaaaaaaaaaaaaagaaaaagaaaaagcgaaacagccttattgatgatatagagaaagttttagtggtctgaagagaagattgaaccagaagcaaaattcccttaagccaaagcctaatccagagcaaggccctaactctcttcaattgtacaaagtatgagagaggtcagaagcttgagaagtctggctgggcatggtggctcatgcttgtaatcccaacactttgggaggctgaggtgggtggatcacctgaggtcaggagttcaagacctgcctgaccaatatggtaaaaccccgtctctactgaaaatacaaaaattagccgggcatggtggtgcatgcctgtagtcccagctactcgggaggctgaggcaggagaattgcttggacttgggaggtggaggttgcagtgagccaagaatgcaccactgcactccagcctgggcaacagagctagactccatctcaaataaataaataaaataaaaagaagttgcagaagtctgaagctagcagaggttggtacatgaggtttaaggaaagaagccagctccgtaacttaaaagtgcacagtgaagcagcaagtgctgaggtagaccctgcagcattatccaaaagatctagctaagatcatttatgaaggtggctacactagacaacagactttcaatgtagacaaaacagccttctattgaaagaagatgctatctgggactttcataactacagaggataagtcaatgcttggcttcaaagcttcaaaggacaggctgactctcttgtcaggggctaatgcagctggtaactttaaattgaagtccatcctcatttaacactctgaaattcctagggcccttaagaattatgctaaatctactctgcttgtgctctgtaaatggaactgaaaggcctggatgacagcacatctgtttatagcatgttttactgaatattttaagcccactgttgagacctactgctcagaaaaaaagattcctttgaaaatgctactgccggccgggcgcggtggctcacgcctgtaatcccaacactttgggaggctgaggctggtggatcacgaggtcaggagatcgagaccatcctggctaacatggtgaaaccccgtatttactaaaaatacaaaaaattagccgggcatggtggtgggcgcctgtagtcccagctacttgggaggctgaggcaggagaatggcgtgaacctgggaggcagagcttgcaatgagccgagattgcgccactgcactccagcctgggcgacagagcgagactccatctaaaaaaaaaaaaagaaaaaagaaaatgctactgccaattggtaatgcaatgcacctggtcacccaagagctctgatggagatgtacaaggaaattaatgttttcatgtttattaacacaacatccccattctgcagaccatggatcaaagagtaattttgacatttaagtcatgttttaagagaaacattttataaggtatatttgccttagtgattcctctaatggatataggcaaatacgttgaaaactttctggaaaggattcaccattctagatgtcattaagtacatttgtgctttgccactgctgaatcagtggctcagctatgtgcaagattaggcttcatctgtaacccaccaccgtggctgaggaagccattgctgctgaaggtgtaatggatgttaagaatactttataaggttgaggacagtggctcatacctgtaatcccagcattttgggaggttgaggcaggaagatcatttgagcccaggagttcaagaccagcccgggcaacatagcaagaccttgtctctacagaaaattaaaaaattagcgaggtgtcggctgggcacggtggctcatgcctgtaattccagcactttaggaggccgaggcaggtggatcatgaggtcaggagtttgagaccagcatggtgaaactccgtctctactaaaaaaataaaaagattaaccaggtgtggtggtatgcacctgaaatcccagctactcaggaggctgaggcaggagaatcacttgaacctgggaggcagaggttgcagtgagctgagattgtgccactgcactccagcctgggggtgacagagggagactgcgtctcaaaaaaaaaaaaaaaactatctacaaagaatctacaaagaacttaaacaaatttacaagaaaaaatcaaacaaccccgtcaaaaagtaggcaaagtatgtgaacagacagttttcaaaagaagacatttatgcagccaacagacacatgaaaaaatgctcatcatcactggccatcagagaaatgcaaatcaaaaccacaatgagataccatctcacaccaattagaatggcgatcattaaaaagtcaggaaacaacaggtgctggagaggatgtggagaaataggaatgcttttacactgttggtgggagtgtaaactagttcaatcattgtggaagacagtgtgacgattcctcaaggatctagaactagaaataccatttgacccagcaatcccattactgggcatatacccaaaggattataaatcatactactataaagacacatgcacacatatgtttattgcggcactattcacaatagcaaagacttggaaccaacccaaatgtacatcaatgatagactggattaagaaaacatggcacatatacaccatggaatactgtgcagccataaaaaggatgcgttcatgtcctttgtagcgacatggatgaagccggaaaccatcattctgagcaaactatcacaaggacagaaaaccaaacactgcatgttctcactcataggtgggaattgagcaatgagaacacttggacacagggcgaggaacatcacacactggggcctgtcgtggggtggggggatgggggagggatagcattaggagaaatacctaatgtaaatgatgagttgatggatgcagcacaccaacacagcacatgtatacatatataacaaacctgcacgttgtgcacatgtaccccagaacttaaagtataatatataaaaaaaagaaaaacaaaaaagaatgaaaaaaaaattagcgaggtgtcatggtgttccagctactcaggaggctgaggtgggaggattacttgagcccaggagtttgaagctgcagtgaactatgattgtgccattacaccccagcctggtgacagagcctgtctccaaaaaaaacaaaaaaacaaaaaacaaacagtttcctaagaggcgctgaagacctccctcaagcatgatgacctattacatggaatttgcaaagctgccaaaaccttagataaggctttgtgtgcttgcatccatgtgtgatgagcctgtgtatgtcacgttggtggaggcccttagtgcttaacaccgtatcaccctaattaaggttgaccagaaagtaggcgaatgggtaggcttctgtaaaattgacagaggggggaaaaccctgtaaagtggttggttgcagttgtgtagtaggtaaggactatggcaaagaatctcaagccaaagatgtcatcgaagagtacttcaaatgcaagaaatgaaccaataaaactacagctcatgctcctcgaggaaaaaaaagaaaattcgtgattcatgagaggaggtcaaaatatcaacattaacagaagtttggaagaagttgattccaactctcatggatgactttgaggggttcaagacattattggaggaagtaactgcagatttggtggaaatagcaagataactaaaagagagagaattaatagttctaccctaaacagaatgcagtggtgggcacctgtagtcccacctacacaggaggctgaggtaggaggatcacttgaggccaggagttcaagaccaacctgggcaacatagtgagatacagtctcaaaaaaaaaaaaaaagtgaagaggagttgcttcttatggatgagcaaagaaagtggtttcttaacatggaatctactcatggtgtagatgatgtgaacattgttgaagtaataacaaaggatttagaatatcacataaagttagttgataaagcagtggcaggatttgagaggattaactccaattttgaaagaagttctactgtgggcaaaatgttgtcaaccagcgctgtatgctacagagaaatcttttgtgaaaggaagagtcaatagatgtggcaaacttcattgttgtcttattttaagaaattaccgcagtcactccaaccttcagcaaccaccaccttgatcagtcagcagccatcaacgtggaagcaagaccttccaccagcaaaaagcttatcacgctctgaaggctcagatgattgtgagcattttttagccataaagtatttttaaattaagttatgtacattttttagacatcatgctattgtacacttaatagactacagtataatgtaaacataacttttatatgccctgggaaacaaaaaattttgtacagctcactttattgcaatatttttattttgcaataaagcaatatttgctttattgtggtaacctggagctgaacccacactagctttgaggtatgcctgtactatagtttctttaacctgttcccttactgatgtcattttgttccagtttggagctattacaaacaacgttgcaatgagtactcttgttaatgttttcttatgcatatgtgtaaattttctctagttatgcttgggagtggattgatggatctaggttatgctcatcttgaactttattctatagggtatacaatgtgccagacattattctaagcacacaatataaatataaatatgtaccttacaactatcctttgagataaatattattttccctattttacagattgggaaactaagacacagagagattaagtgacccacccaaatcacatagctagtaagtagcagatccaagcaatttccaaaatccaggcttttaccaccacatcatgccacagcatgatgctttacactttgggaatgaatgcatgtattttcctgcggtatgcttatctaatctcttcaattcttggttctttttcaaagtttgatgtggttaaatcaaggaggaaaatattcactagaaatattatcatcataaaaaatgtgaatatgatcaacgtgagccaccaccttgactttgatcaatagtcaggaaactaaactatcaatgttcttccccttttgaagaaattatattgcattttttgatcacataactactgagggttttctattaaaaaataaaaaatgggctgtgtgcggtggctcacgcctgtaatcccagcacttttggaggccgaggcaggcagatcacctgaggtcaggagttcgagaccagcctggccaatatagtgaaacctcatgtatgtctaataaaaatacaaaaattagccgggcatggtggtctgcgcctgtagtcccaactactcggggggctgagactggatcactttaacctgggaggccgaggttgcagtgagccaagattgccccgctgcactccagcctggacaacagagcaagaccctgtctcaaaaaataataataaaataaggccagacgcggtggctcacacctataatcccagcactttgggaggctgaggtgggtggatcacctgaggtagggagttcaagaccagcctgaccaacatagagataccgtgtctctactaaaaatacaaaattagccaggcgtagtggtacatgcctgtaatcccagctactcgggaggctgaggcatgagaattgcttgaacccatgatgcggaggttgcagtgagccaagattgtgccattgcactccagcctgggcaacaagagtgaaactcctctcaaaaataaataaataaataaaatattaaaaatgaatctaaaatataattattttataatagctaaaacttcctgttctggaatgtagcttaatatttcagactactgattgtatcatacattagtaataaagattaaaacaatgttctaaattatggaaaatgaggtaaaggagaaaaaattaaaaaaaatagacctgtatacagagttatagaagtaagctgttatttctgtgcatagtttaatgctggttggaaatttcagactgctacaagagtgtaagaatttttttcaatcttactgctaagttagggttgcagtcaaattaatttaaagtttgttatagatcttcgtgggggaaaaaatgaaggaagataaatgtttgtgttttttttttccttctgtaagttcttcagctaaaccagctatgctgcattgtatgggtggatttaggatgctggggatccctcaccatttttttaaaaaataaaatacacccattaagtatcatttatttagtctagcatgtgggatgtgaagcatttcccacagaagtcatttgtctctgtctgtggataggccttcctagggaacacttaatgagattgctttttctcctgactcctttaatgttttgtttgcagttcctaaatccaaattataaatttatcttgcagtattatactttctatgatgatgaacttcttactgacagtaacaatcaactgccatcattgttttgcttccaaagaaaaacagtctttcaaaatgcagacattttaatcattcagatataggggttgtgaaacacaaaaatataaataatgaacaatggaaaatatttattaaagtatattagaaatgtatagatccatattgtcatgtttagttggataacatcagaaatttgtatgggcaagatatataaaattattttatttcctataaattaaattaaatctgactttgaattgcccaacctggtaaaatatagattcatatcagtcattatgggaacacatagaaaagaatatgtctttcttcctttccttccttggtcctctccaacccaagagtagcgcaaaaacctaagaatcttttaggaaaaaagaaaacaaataggagatgggcccacttgtctgcagttatcaccatcatggactgatacccttattgaataagttctgcttcaagtccgatgacattattgcttttctggtcaagcttggacatgagagtctctcttgattgtgaacccccagtaactacagtccagcctcccaaggtactccatccagccattcttctttgaggtcttgccatttccttggagaacagccaggaagtaggattcaggtcacaactatccctggtgttgctgaacatttttccaatttgggcaagctgggtttagcaggctatttcccagtctcccttacagttctcaaagcttttgcctttatctcaagcttccagaaaatgaaagtttgaaggcagattatctacaaataacttctgctttccagtctgtaactcagatcttctgtaaataatggaacctgaagacctggttacctgtttaaatgaggaaagggaaaaagaagtggagaacaaatgaaaattaaaatcttatattgtcctgccacactgacatgcacacccacagacataaacgtaccacttttctgcctaatcccagcttctgggttgttcagtttttattgagttcttagaaggaagagggcctagaaaattatagattaatctgtatttgtgaataattgagaactcactaataaaatgggcaccttggatattatgtttacttcttgttgtaaaaaacagagtaaagctttgttacctagggttctcccctcttcccctgccaattattagaaaagtaatctaatattttccaaataaatatataattgtggaggactttcaatagacactaaagaatagcaaagtaacgcagatctataatgaaaccagatctgatagtgttattacttttacttgaatttgaaataatttcaaaaagagccagaaattattattgagatctatactattctgaaagctgagatagagaagaaagttgaatacatgtccactaccctcttgcagatagtgaaaaatgtgtgaataaatttataattatgacataataaataaaaaaggtactatgaaagtatagaagttgaagaaaagaagttgaagtctttcttatataatattttgcttagcagggttggcatgtactatcatctttatttgccagatgaagaaatttgagttgaaagaggttaagtatcttgctcagttacacagaataagtggtatagtagtacattcttaatgtataagtgatcagaggctggggaaatgatttctaacaagggtaataatttttataatactgcctgatatttttacactttgaatctgatttataagattgtctttctacctacttgattctgcaaagaatttgaaagttcttctcataggcgaatgactatccttgtcttaaattatctgcttatctagaagatatctgcaaaataacttgctgggattttggttggggttgtgttgaatttatagatcaaatgggaataactggcatcttgacaatattgagtctcccaatccatgaatatgaaatatttctccattaatttagttctttgatttctttcaacagagttttgtagttttccttatattagatctcatacatattttgttagatttatacctacatgtttcattttggggggtgctaatrtaaatggtgttgtagttttaatttcacattccccacttattcattgctggtgaccaacatggagaaaccccatctctactaaaaatacaaaaaaaaaaaaaaaaatcagccggatgtggtggtgtatgcctgtaatcccagctacttggggaggctgaggcaggagaatcgcttgaacccagaaggcggaggttttggtgagccgaggtcgtgccattgcactccagcctgggcaacaagagtgaaactccatctcaaaaaacaaacaaacaaacaacaaaaaacaacaaacaatttctcctatagttttgtataattccttgttggttctaggggttttttgactctttcagattttctacatagttatgttagttttctacatgttacagttttatttcttccttcctaatcagtataccttttaattctttttcttgtcttattgcattaactaggacttcaagtacaatgttgaaaaagagtagtgagagggaacatccttgccttgttcctgatcttagtaggaaagcttctagttgtttaccattaagtgtgaagctagctgtaagtcttttatagatattctttattaagttaaagaagttgccctctatttctggttaactgagagtttttatcattaatgcgtgttgaattttatcaagtgctttttctgcatcttttgatatgatcatgtaatttttcttttttagccttttgatatgatagattacattaattgatttttaatgatcatcagatgcatcaattttgcatatctgagataaatcccacttttttgtaatgtataaatctttttatacattgttggatttggtttgctaatatttagatgaagattattgcccctttgttcctgaagatattggtctgtagtttttttttcttgtaacatctttgttgggcattaaagtaatggtagtctcatagaatgagttaagttagccactgcacccagcctatttcccttttttaatttttaatttttgtgggttaataggtgcactaattaattaatagrtgtattaatttttattaatagaatgagtaatggtagtctcagagaatgacttctatcttctgaaagagactgtagagaaatagtataatttatgccttaaatatttggtagaattctccagtgaacctatctggttttggtgctttgtattttgaaaggttattaattattgattcaatttctgtaatcaatttagacctattcagatagtttaattcttggcagattgagtcttgcaaggaattgattcatttcatctaagttatcaaatttgtatcaattaatttgtatcaaattaaaaatcaattaatgtaatgcatagagttcttcatagtattacttttattatcctttcaatgtccatgggatctatagtgatgtcccatctttcattcctgacattagtaacttgcatcctctccttttttcttagttagcctggctagaggcttatcgattttattgactctttcaaagaaccagcttttagttccattgattttctctattgatttcctattttcaatttcattgatttctgctctaatttttattatttccttcacccaggctggagtgcagtggcactgccagggctcactgcagcttcaatctcccaggctcaagtgatcctcccacctcaacctcccgagtacctgggactacaggcgtgtgccacctgtccagctaatttttgtattttttgtatagacagggttttgccatgttggccactctggtcttaaactcctgggctcaagtgatctgtccacctcagcctctcaaagtgctgggattacaggtatgagccactgtgcccaacccatttcccttttttaatttttaatttttatgggtacatagtaggtatattaatttttattatttatttccttctgctttctttggatttaatttgctcttctttttccagtttcctaatgtggaaacttaaattatttattttaaattttttttctaatatatgcacttaatgttaccaatttccctttaagcactgctttcactgtattccacagattttaataagctgtgctttcattttcatttagttcaaaatattttaaatttctcttgaaaatttttctttgattcatgtgttatttagaagtgaattgttggccaggcccaggggcttacgcctgtaatcccggcactttgagagactgaggcaagtggatcacgaggtcaggagatcgagaccatcctggctaacacagtgaaaccccgtgtctactaaaaatacacacacaaaaaaaaatttagtcgagcgtggtggcacatgcctgaagtctcagctacttgggaggctgaggcaggagaatcgcttgaacccaggaggcgaaggctgcagtgagccaggatcgcgccaccgtactccagactgggagacacgatgagactccatctaaaaaaaaaaaagaaagaagtgaattgttttatctccacatatttggggattttccaattatctttatgatactcatttctagtttaattctgctgtgatctgaataagacattgtataatttttattcatttaaatttcttaatgcatgtttdawggcccagaatgtggtctatctggatgaatgttccctatgagtttgagaagaatgtgtattctgctgttggatgaagtagtctgtagatgtaaattatattcagttgatggatggtgttgttgagttcaactatgtccttactaattttctgcctgctgcattttgtccatttctgagagagggatgttgaagtctccaactatagtagtggattcatctctttgtccttgttgttctaccagtttttgcctcacgtattttgatgcactcttactagaaacacacacttaaaggattatcatattttcttggggaattgactcctttatcattatgtaatgcccttcttcagccctgataacattccttgctttgaaatctactctgtctgaaattaagtatctacttctgctttcttttgattagtgttatcatggtatttttctctattttctttcatctatatgtgtctttatatttaaagtggatttcttgtagacaacatatagttgggtcttgtttttttaatccattctgacaatcatttaatttgtgcatttagactattaatgttcaaagtgattattgatatacttggattatttaccatatttgttactgttttctatttgctgccttgttctttgtttctatttttgtcttctactctttttctgctttttttttttaattttttttgagacagagtctcactctgtcatccaggctggagtgcagtggcacgatctcagctcactgcaacctctacttcccagattcaagcaattctcctgcctcagcctcccgagtagctgggattataggcacccacccaccacgcctggctaatttggtattttagtagagatagggtttcatcatgttggccagattgatctcaaactcctcaccttgtgatctgcccaccttggcctcccaaagtgctgggattacaggcatgagccacccggcctgttgttttaatttaatattttatgcttcagtttcctcttttttagcatataaattatgcttctttttatactttttttttttaaggcggggttttgctcttgttgcccaagcaggagtgcaatcgcatgatctcggctcactgcaaactctgtgtcctgggttcaagcaattctcctgcctcagccttctgaatagctgggattatagacgcccaccaccatgcccagctaatttttgtatttttagtagagatggggtttcgccatgttggccaggctggtcttgaactcctgacctcaggtgatccgcccaccttggcctttcaaggtgctgtgattacaggcatgagccaccgtgcygagccactttttatacttcttttagtggttgctctggagtttgccatatacagttataagtaattaaagcccactttcaaataacactacaccatttcactgatagtgtgagtgtattataataataaaataatcctaactcctacctcccatcccttgtatcattgctgttatttattttacctatatataaacatattcttaagcatatggatatatatacacacataagatacatacatatgcataatcaaatgtattgttgccattattatgaacaatctgttaggtcaattaagaataagaaaaatacaaggtttaatttttatcatcacttatttcttcttttgtgccctttttttttatgtgcatctaagtttctgacctatatcaattctttctttccaaagaatttcttttaatatttcttgcaaggcaggtctactaggaacaaatttcctcagtttttttgtttgtctgagaaagtctttatttctccttcactccccactgccgctcaccaccccgccaaccccacactgagacaggttctcactccatcactcaggctggaatgcaatggcatgatcatagttcaccataacctgaactcctgggctcaagcaatcctcctgcctcagcctccttagtagctaggactacaggtacacaccgtcacacctggatatctttgtttcctttttgtagagacaggctcttgctatgttgccctgtctggtcttgaactcctggcctcaactgatccccccatagcactgggatgacaggtgtgagccaccatggctgacctctcctttgcttttgaaggaatattgcagggtacagaattctaggtgggtggtttttttctctcaacccttttttcactctgttctcttcttgcttgcatggtttctgaggaaaagatagatacaattcttctctttgctcctctgtaagtaaggtgttttatttttctggcttctttcaagatttcattctttatccttgattttctatagtttaaaatgatattcctaggtacarggtttttgtttttgttttttgacatttattcttcttggtgttctctgagatttctgggtctgtgatttggtgccaagacattaccttggggaaattcttagtcatttttctttctttctttctttctttcttttttctttttctttttttttttttttttttttgagactggagtgcagtggtgctatcttggctcactgcaaactccacctcctggattcaagtgattctcctgcctcagcctcccaactagctgggattataggtgcccgccaccacacccagataatttttgtatttttggtagagaaggggttttgccatgttggccaggctggtcttgaactcctgacctcaggtgatccacccgcctcgttgccccacagttcttgagtattctgttctgtttttttcagtccttatttgcttttcagttttggaggtttctattgtatatcctcaagcttagaaattctttcctaagccaagtccaggctactaataagcccatcaaaagctttcttcatttcttttacagtgttttttatctctagcattcattttggctctttctttagatttccacctctctgcttataccgcccatctctttttgcatgttgtctacgttatccattagagcccttagcatattaatcatagttgttttaaattcctggtatgataatcccaacctctccaccatatctagttctgatacttgttctgtcttttcaaaattttttttgcttttagtatgtcttgtaattttttcttaatagccagacatgatgtatagggtaaaaggaactgctataaatagccctttagtaatgtggtgataaggtatgtagttaggggaaactagtcctgtaattagacttcattcttttagtgaggctgtacttatgractgtgagcttcacatattgttctcagggttggttttgttttttcctccaccttaggtgggacaagaaggctagagtgagctggagatgggtattgcccttcccctaggtcagttaggctctgataaaccccatcacattagactctggttagctagtttcttctgaaagaagaccttattaagaagaasagggtgctctgccgcatttcaacatggttccttttcccctcctcttgccagattcatgaggggatttttttctgatactcactgtgatgacctggtagagctcctggaggtgaaactcacaaaagtgtggggagcccctctgactgggtcttcctggagtttttgactatcagacttctamacctagtctccagcagtttgtcaattacagttcaggttttcttaccctggaattggttcctatggaggtgtctgatgggtatgttttataattctctgtatacacctgtccaattttaggagcaactgtgacctcacttctcttaagaatctaagaagtattgttggttttgcagtttgcttagctttttacttgttgttaggttggagtggccacttccaagcttcttacaagtggaaccaaagctggaagtcttccctctattgttaaaataattctcttcaaatttttttctctttattttaattgtaacacaggaataggggataacatttaaccaccatttgtgtactacagaatagtcagggccatactaaagattggagtaggccttaggaccagatgaaataagcatctggttatttcatgatttcatcatgatttcaaagggtcagttgaaggcttttcaggtgcatttaaaagtatctctactggttaataagaataatatctaaaattgtaacactagaggtttatttctttggtttattgttcttgttaaaatgcagataaccctgaagcgtttttcttttgtacgtttttaatataaagtcattcattcattcaacaaatacttattgaatgcctactgtatactaggtgctgttctgggtgctgaagataaataagtgaacattattgattgagtccttgtggagggcaagagtgagatagacattcattcacaaataaataataagaaagatgttaagaaggtactttttttaagagagtgagtgttagaaacaagagctcagagtcgcaaggaaaacaagcactcaaaccatttctcagcaaggcaaatttacttgtgcagaagggtgccgcttgcacttctggcctctgcgagagcacaccaaacaaaggagagaaggattttttatccctaacgcagtccctatccctgtgtccttcccctattggctagggttgaactgtacaatctaagctgaccctggttggctaagacttaaacttttccaattagggtaaacacacgatttgcaagggagggagggggtaggagtggtcccgctgctatagcacaaggtatgttcggatatgtctgggcaagtcagggcacaacaagagcgggagggctgcttgcaggctagaaacaagatagtacaaagaagtgaggcctccaaaccaaggacaaggacattacacaattaaaccctttgaagaagaattcactatctctggcagtgagtaagaaaatcctctctaatgttacatttaagcagagacttgaaggaagtgaggatatgaaccatacgactgtctgaagaacatttgttccaggcagagaaaatgatgcaaagtgcaaagggcctgaagtaagtgcataattggtatgtttgaggaataacaaggaggccagtgtgactggagtggattgaggaaagagtagaattgtaggagatggtcagtgtgacactgtgatttataataagaaataatacatttggtcttcctcaccatttcctgacatacagcttctaaaactcttagaacctccgaaatgatgtgtctttttgtatgataatgagacgaatgatggctggtggctcctagttagcctcaggatgggggtgctggttgccaggagaayggaccatgtgattaaaagattgaaactttcagtcatacttccttcaacccctacatccaggaaagggagaggagctgaaggttgagttggtaaccagtggctagtgatttaatcaatcatgcctatataatgaagcctttgtaaaaacccagaaaggactgggttcaaagagcttcttgtgctgaggagggtagcacacctttaactccacagggacagaagctcctgtgcttgggaccattccaaatatcaccctaagtgtctcttcatctggctgttcatttgtatcctttaaaatatcatttgaaataaattggcaacagtaagtaaagttttgcctgagttctgtaagctactctagcaaataaattggacctgaagagggagtcatgagaacccctaatttatagtgagttggtcattctacatatctccaagtagatagagtcagaaatgattgaattatagggcattcagttggtgtctgctggagaattgcttgatgtgtggggaaaacccccacaacatcttatgtcagaaataatgtgttgagtgttgagagtaggaaaagtgtttgatttttcccatgtcctacagttagcaaggtaataagtgagtttataaggatctaggcttgagcagacttaaaaaaaaaactttttaattttggataattttagatgtacaggaaagctgctaagataatatgataattacccaatgggttcttcttgcccactgcacagagagagctgatttactgagacagcagtattgcaatagcgaagtagtgtaataaacgtagagccagctgagcagaagacaggagtttattactcaagtcactccccctgaaaaattcagagattagggtttttaaaggataatttggcagcagggggctaggggactgctgactggttgagttggggatgaactcatagggaatctaagttgtcttcttactgtcttcacttcctgggtaggattgcaagaccagctgagccagctttacctgtctgggtggcaccagctggtccatcaaaatagagagtctgaaaaataccccaaacatgaatcttaggttttataatagtgatgttattcataggagcaactgaagaggttacaaatcttgtgacctctggctacatggcttctgaaccacagttctaacctcctggctaatttgttagttttacaaaggcagttttgtttcctgagcaaggagagtgttatcatctttgttttaaagttaaattaaattcctcctatagttcctcctatagttcattccgcccaggaatgaacaaggacagcttggaggttaaaagcaagatggagtcagttaggttagatttctttcaccatcataatttttccatgtcaaatttttctcactgttataatttatgcaaaggtagtttcaatattaccatctacctcttaccatttcccctaattttaacatcttacattatcatggtgtgtttgacaaaactaagaagccaaccagcatttgttcattactgttaactacattccagacttaccttgtatttcatcagcttttccactaatgtcctttttctgttctaggatccaatccaggatactacattgcatcacgtttatttattcttttgcagtctgtgacagttgctcaatccttccttcttttctatgagcataacagtcttaaggagctccaactggatgctttataggatgtttttcaatttgggcttatctcataatgttttccaaaagactagactggggttatgggcttctggaaagaataccacagaggtaatatacccttctccaggaggtagtgttaacccccatccccagtcttgagtgtgggctgactcactttctaaaaaagaatatggagaaagctgacaaatgctaccttaaccaagtgatcaaagttaatatcaccaccagtgatattatgttgatatgatgtggtgagtccagcaaattttgatgtagagataacatgtgaataggacctgattttagagacatctttgcccactttacaattttccatagactaaactcattaaaaagtacacataatctatagcaaagttattttaagtcgagatttttgacatttctccttatcttccataattatttattacttagtacccaggattgttattttcattttgtagtgtccatatgggggagaggaaaagagagagaggaagagagaaggaaggggcagactttggttgttttgctgcttttgtaataatccacaaatacatcctatcagtggttgtaattgttaccggaaaggggtcccagtgcagaccccaagagagggttcttggattttgtgcaagaattcagggcaagtccacagtgcaaagagaaagcaagtttattaagaaagtaaaggaataaaagaatgactaccccatagacagagcagccttgagggctgctggttgtccatttttatggttatttcttgattatatgctaaacaaggggtggattattcatgcctcccctttttagatcctataggataactttctcatgttgccatggcatttgtaaactgtcatggcactggtgggaatgtggcaatgaggatgaccagaggtcgctctggttgcaatcttggttttggtgggttttagccaccttctttactgcgtcctgttttatcagcaaggtcttcaagacctgtgtcttgtgccgacctcctctctcatcctatggcttagaatgcctaactgtctgagaatgcagcccagtaggtctcagctttattttacccaacccctattcaagatggagttgctctggttcaaatgcctctgacacaatgaccaaagactatattgaatcatgtatggtcagtagattgttagtttgtaaaagccctgaattttacatctttataattcccattcaactcagagctggctatattaagtgccatttttatagccaaatagttttatttttgttgcatatttaagggatttttcaaatgtttttctctattaaaatgcattgtagcttacctactttgcaatgtggaatggaattaatgctgaattagtagatagaaaatttgtgttctaggtcccaccccattacttcctaaatataactagggctaattcacttaactcaattttctcatctataaaatgggtacaatcatacttcatctttacctatgcctactattcagcatgcattcttagagtttttccatttaaattgtgttgtggtttttcttatttgtttgagacagggtttctcgttaygttgcccagtctagactcaaactcctgctctcaagtgatcctctcacctcagcctcccaagtagctgggactacagacacattccactgcatttaaatagattttaaaggccattaaataatttggaaaaaaataatttcaagcatagcattcctaacaagtaagctgctattagctgctccttacaggttgttgtaaagtttaaaagacagcgtgtacataaagacaatgtctagcacataataaattttgaataaatagaaagtaataggatagaggtagaattttctattgtcctgtttccctgatcccatttaagtaaatatttaattaattcttgtacattctccacaggcctttgcttatgaattcctgtcagtaagaaattatagcttaaggatgagcttgctgtcatttaaaaaaagaaagtatagccccgcacagtggctcacacctataatcccagctactcaggaggctgaggctggaggatcgcttgagcccaagaggttgaggctgcagtgagccatgatcacatcactccactccagcctgagtgacagagcgagaccctatctcaaaaaagaaagaaattatgacagaagctaactaatcagatgttagggatattatagagagaatccctacctgtaaattgaaagttggccagatgacttctgtggttccttccaattctatgattttgctttaatacatatagtacctatctctcagggtttaactgagagctttaagggctgagatagtatatgggaaaaccatttgtaaacataaagtactatacaaatatgtggtattattatataagactagtaaactagtcaacagagattccctcagtaactgtaagaactatctgtggtggggcacggtggctcacacctgtaatcccagcactttgggaggccaaggcaggtggattgcttgaggccaggagtgtgagaccagccgagccaacatggtgaaaccccgtctctactaaaaatacaaaaattatccgggcgtggttgttcatgcctgtaatcccaactactcgggaggctgaggcatgataatcacttgaacctgggaggcagaggttgcagtgagccgagattgcaccactgcactccagcctggggaacagagcgagactctgtctcaaaaaaaagaaaaaaaaaaaaaactatctgtattcattgaaaattaaaagatacacataatgtattgaggtgttttttgttttttgttttggtgaggcctagaatttattatattataatcgttgccattgtttgttatctatttatgtttgttttcttagctaagaggattgtagcacttttttatgtagcatacattctcctatttcttccattacatttactctgtgacagtttttcctaaggcaatgcccagatgtgttgtggttaaggttataattcagcatttctatcaaggagacatctttctgaaaactatttggaaatagacagtagctctctgcaatcaaattcactcagcttgatgccactactcttggtttaacttaagcagcacagaaccaattttatggtgaattcagaagagaagctattgctggaaaataaaatgactttgagcccttctatagtatttatctactgccaactatttcttctcctcattattagaatagtacatactttgtactgttgtgattcttctgtgtagaaaaaagttttataactcattttgttttttttagttttgtcatttttcatttactgaccagatcagatcttttcaaagtcaaactataattttattctttagttccctatggagtagcatttaaagaaaatcatggtaaattactctattcttagttggaattttattttacagctatgaataaaagcattttcctagatattttccatagaattcctgaaaatagtttctcagatctttctcagtattaaaagtcaggctgagattctcattttgtccctagttgctgtaattttgttacttcccccatcagcattcccatttcttttaatttttaaaattcttttggtttattttctgagtttaacagtggggaatccatttgactgtgctcacagcaggtagtaagtactatggtagacactggattggtttctttggatggttaaaagaataagagggtaattaagcttttctgaagctgccaactgtattggaggtttggtgtacatttaaggcttatttaaaaatagttccttcagaaactgaacatttaaccagtagaattcctaagggcatatcgtttttatcaggtagcgattacttagattactagaatttgtgtcaaatagatttcctctttcatataagactaagtctaatgctgtactatctcattctgacttgtaatgttaatttatgatctttagtagggtgctttttacctaccataaactcccaaatatagctttttaaaataatgtgtgctttaaaaatacatgcatcttgtaatcctagcactttgggaggctgaggctggtggattgcctgagctcaggagttccagaccagcctgggcaacacggtgaaaccccatctctactaaaatacaaaaaattcgccgggcatggtggcatgcacttgtagtcccagctactcgggaggctgaggcaggagaattgcttgaaccctggaggcagaggttgcagtgagccgagatcacaccactgcactccagcctcggtgacaaagggagactccgtctcaaaaaaaaaaaaaaaaaaaaaaaagcttctaaaaaactgaatagaaacgtttattcagttacttttaaagatgcagaattagccaaagctttgcttcttgaactcaaaatctaaatctagataaaatgcagaaaagggattgcttttatgagctacagttatgaggtctaaaattttatctacataagctgggatgttgacatgtttaaaaccccaaacattctgtactgaaccataaatggaagcagagctatagtctccagagttgtaattttcccagtggtttgattcagagtactttgaaaaggtaatttaaatttaaatttgaaagggagaaatgcctaaaggttttatggctctcagaagataatggataggaatagtcattgtatgtgagagaaggaagaaaaccataagagaaatgtggcatttagaaacatgtactaaacctggtggaagaatagaaattgatagatggaaagaggtgatgtagggaaaatatacagtcattgaacttgagagttcttgaatagttaacattcagctttcattctattcatttaataaatatttactgagtaccttctgtgtgctttttggcaccgtggttttaagcagataagtgtcaatgacataactaattttaaactttctgttttgaaaccattttagatttacagcgagttgaaaagatagaggctgggcacggtggctcacacctgtaatcccagcactttgggaggccgagatgggaggatcacctgagatcgggagtttgagaccagcctgaccaacatggagaaaccctgtctctactaaaaacacaaaaaattagctgggcgtggtggtgcatgcctgtaattccagctacccaggaggctgaggcaggagaatcacttgaaccagggagggggaggttgcagtgagccgagatcacaccattgcactccagcctgaacgacaagaatgaaactctgtctcaaaagaaaaaaggaaaaaaaaagatagagagttctttctcccaggtgctacatgattgtggtacattactcaaaactaagaatttaccattggcactgacagttttaaaggacatatcttatctggcacttgctggcagaataaactatggggtcaggggagggcagggtagaagcagggagatcagttagtagttgatgacattaatccaggggaagcatagtaatgatggtttagactaggtgtttatctataaaagtggtaacaggtagtcggattttgaaaatagaaccaagaagatttgctgatggattggatttgggatgtgagataaacagaggaatcaaaatgactctaagatttttggaaaggagtcatttctaaaaatggaaaatgagttttagcactaaacttactgtccttccttccacaccaaccttactgcctttctctccacaactctttaaaagttttagttatttcattatctacacagacaatcctccaatgctcagatatctctgtttcttgacctcctcacctccagtgatcttgtcttccacctcaatttagtcacctgctcataagatcatcctctaggctatgtcgttactaataactaaaccttcattttaagcattctactctcctcccacaactcctgtctttccagccctctccctgtagtatatggacttcaacaattttaactccaacaggaccttggatccattttctctatgatcttcactaccctccttccttggcccattattaaaatgaggcaaatggaaaactagagttactatttgttgaaataaggaagtttataggagaaatgggtttgatgaaaaggaggttgagaattaggattttgttttaggacaaataagtttaataagtttgaaatgagcattagatatccaagagcaggtacttgaatataagagcctagtgttcgaatgagaggtttggaccagaaacatacaatgggagtcatcagcatatagataatacataaagatatgagacatgataaaatctattaaatggatagagatagagaagaggtcaaggactgaaccctgggcattaccatttttagagatcaggaaaagagaaaccagtgaacaagatcaaaagaagcatctaatgaagtagaaagagaaccaagagaagtggtgacctaaaagtgaaacaaaaaggtttcaaggtggagaaaaatgatcatttctgtcatatactgctgatagtccaaataaaatgaagatgagaattgacagttggatttggcaacatggaagccattgtgactttaataagagcagtttcagaaaagcactgagaattagagcctgaatggaatgagtttaagagacaatgggaataaagaaggtagagacagcaagtacagattgctctttcatgtttgattgtaaagggcagcagagaaatgggactttgactgaggaggtgaaatgttggtcaagaaacctgtattttaacattggaaacattgtatgctgatggaaatgactagtagagaggggtaattgataatgtaagagaaagacagttacaggttggtgagaggggatagaatccagtagatgtggctaggtgcagtggctcatgtctgtagtcctagcactttgggaggctgaggtgggtggatcacttgaccccaggaatttgagaccaggctaggcagcatagtgagactccatctctacaaacaaacaaacaaacaaacaaaaaacaacatctgggtgcctgtgaggtaggaggatcgcttgaacctgcctggttgaggctgcagtgagccgtgatcgtgccactgcactccaggcttgggtgacagagtgagactctatctcaaaaaaaaaaaaaaaaaattcagtgaatcagtagaagagatggccttagataggattatggacagttttaccattgtgtaggaagaaagagtgtggccgggcacggtggttcatgcctgtaatcccagcactttgggaggccgaggtgggtggattgtctgaggtcaggagttgaagaccaggctggctaacatggtaaaaccccatctctactaaaaataaaaaattagccgggtgtggtggcacgcacctgtaatcccagctactcgggaggctgaggcaggagaattgcttgaacccgggaggcagaggttgcagtgagccgagattgcaccactgcactccagcctgggcaacagagygagactccatctcaaaaaraaaaaaaaaagaaaaaaaaagagtgtatgggtacagatgcacatattttagtatatatttagtatgatgagagcttacgtgagttataatttctatttttttcaatgaggagagggagggagaagagttgatttttttttttttaatatagtaaggtaagtaacactaaaggctcatttaacgttagtagtaatgaattaaaggaagccaagtcattatgtttgagttttactttggtcacattcagctgtctgaatgctgcagtggcacgatcatagctcactgcaacctcgaactcctgggctcaagggatcctcccacctcagcctcccatatagctaggattacaggtgtgtgccaccacatctggctaatttttgtatttttttgtagagatgggatattgctatgttgctgagactggtcttgaactcctggcttcaagcaatcctcctacttcagtctcctaaagtgttgggattgcagatgtgagccattgagcccagcctcttaccttattctttttaatggctgcattgtattccattgtatttcacctgtgccctattgagaatttttttttattattatttctaggttttcactgtagtgaacatctttaaatatatgtcttgaagtactttttttttttttttgagatggagtctcactctgttgcccaggctggagtgcagtggtgcgatctcggctcactgcaacctctgcctcccgggttcaagtgattatcctgcctcagcctcctgagtagctaggactacaggtgcataccaccacactcagctaatttttgtatttttagaagagacggggtttcaccatattggccaagatggtcttgatctcctgacctagtgattgaagtacttttacagctatataaatagaataaatttctaatgttaggttgaaataaatgtgaattttgaaaaatattagggccaggtgtgatagcttatgcttgtaattccaagactttgggatgccaagacagctggatcacttgaggcctggagtttgagaccagcctggccaacatggcaaaaccccatctctactaaaaatacaaaaattagctgggcatggtggtgcacacctgtaggcccagctactcatgaggctgagatggaaggatcacttgagcccaggaggcagaggttgcagtgagccgagattgcaccactatactcctatctgggtgacagagtgagaccctatctcaaaaaaaaaaaaaaaaagaaagaaagaaaagaaaatattaggtggataaatgatgtggtggcaccacttattatcccaaagctttgggaggcagaagctggaggatcacttgaggccaggagtttgagaccaacctaggcaacatagtgggatcccattcctaaaaaaaagtcatttgggctgggcatagtggctcacgcctgtaatcccagcactttgggaggccaaggtggacagatcacctaaggtcaggagttcaagaccagcctggccaacatggtgaaaccccgtctctactaaaaataaaaaattagccaggtgtggtggcatgtgcctcccgagtaccagctactcgggaggttgaggcaggagaatcgcttgaacctgggaggcggaggttgcagtgagctgagatcgcactactgcactccagcctgggtgacagagtaagacttcgtctcaaaaaaaaaaaaaaaaaagtcatttggacatggtggcttgcaccataatcccagctactcaggaggctgaggagggaggattgtttgagcccaggaattcgaggttgcagtgagctatgcttgcatcactttactccagcctgggcaacagagaaagaccccctcttttttttttttttttttttttgagacagaatctcgctcttgtcgcccaggctggagtgcagtggcgtgatcttggctcactgcaacctccacctcctgggttcaagcaattctcttgcctcagcctcccaagtagctgggattacaggtgtgcaccaccatgcctggctaatttttgtattttttagtagagacagggtttcgtcatgttggccaggctgatctcgaactcctgacctcaagtgatctgcctgcctcggcctcccaaagtgctggcattacaggtgtgagccactgtgcctggccgagaccccatcttttaaaaaaagaaaaaaaggaaggaaggaagggagggagggagggaggaacaaagggaaggagggagggaagaatggaaggaaaggtggaaggaaaaattaggtataccaaatttttctttaaaattatttatttgtctgagtgctgtggctctacagaaaattaaaaatttagctgggtgtggtggcacatgcctgtagctccagctgctcaagaggctgaggtgagaggattgcttgagcccaggagttcaaggttacagtcagctatgatcacaccactgcactctaacctgggcaacagagtttagtccaatagcatgagtttctttttctttttcttttttactttaagtttcgggatacaagtgcagaacatgtaggtttgttacataggcatacatgtgctgtggtggtttgctgcacctatcaacccctcatctaggttttaagccccacatgcattagctatttttcctaatgctttccttccccttgccccccaccccccaactggccccggtgtgtgctattcccctccctgtgtccatgtgttctccttgttcaactcccacttatgagtgagaacatgcagtatttggttttctgttcctgtgttagtttgctgaggatgatggtgtccagcttcatccatgtccctgcaaagaacatgatctcattcctttttatggttgcatagtattccatggtgtatatgtaccacattttctttatttagtctatcattttggggcatttgggttggttccatgtctttgctattgtaaatagtgccacaataaacatatgtgtgcatgtgtctttataatagaattatttatattcctttgggtatatacccaataatggaattgctgggtcaaatggtatttctggttctagatccttgaggaatcgctacactgtcctccacaatgggtgaactaatttacactcccaccaacagtgtaaaagcattcctatttctccacagccttgccagcatctattgtttcttgactttttaataattgccattctgactggtgtgagatggtatctcattgtggtttttttttgcgtttctctaatcattagtgatattgagcccttttttcataccttttttggccgcataaatgtcttcctttgagaagtgtttgttcatatcctttgcccaatttttgaaggggctgtttttttatttcttttttgtttgtttgtttttgagagggagtctcgctctgtcacccaggctggagtgcagtgctgtgatctcggctcactgcaaggtccgcctcctgggttcatgccattctcctgcctcagcctcccgagtagctgggactacaggcgcctaccaccatgcccagctaattttttgtatttttagtagagacagggtttcactgtgttagccaggatggtctcgatctcctgacctcatgatccgcctgcctcagcctcccaaagtactgggattacaggcgtggggctgtttttttcttgtaaatttgtttaagttctttgttgattctggatattggacctttgtcagatgggtacattgcaaaaattttctcccgttctgtaggtatagcatgggtttcagagttttgagggagaaaggagggacactgatctgtaggtggcaataaggagcaagtccctaaaaaaatacatatatataaatgatttcattaacttacattctcatcaacagtgtatggatgtcctagtttctctatactgttcctcctcccctcctccaactgggaattgtgtgttaatgttaagtggtttgtgttaagctaaattgcaaagtattggctgggtgcgatggctcatgcctgtaatcccagcactttgggaggctgagatgggcggatcacttgaggtcaagtgtttgagaccagcctggccaacgtggtgaaaccctgtctctactaaaaatacaaaaattagctgggcgtggtggcacgtgcctgtagtcccagctactcgggaggctgaggcaggagaatccaggaggtggagtctgcagtaagccgaggttgcaccattgcactctagcctgggtgacagagtgagactcttgtctaaattaaaaaaaaaaaaaaaggcaaagtattctaattggttgattggttgtctctgatgaatagcactgaaagaggaaggaagggtactattgcttttcattataactccctttatattttttaatttttaattatgtgctggttatatgaatcatttaaaatatgtgtgtgcgtgtgtgtgtatgtgttatagtgtgtatatgtaaagaagcatagtcaaatatgatacccttagcatccatagccaattaattgtgctgtgctgccagattattttccatgtgtgtgttcatttcctaataaactttgccatttctatttaattgaagagtagcttgaaattttaagagaagctgatttttttttaaattactatttgtatggcatttttggaaactggattgtcttcagtgtaatataacaaaaccaattagctattggggctaatataaaactgcagcagtatctacaacttcagatttaagatgtttgcattaattaaagcaacctaatttttctaactgaatggactataatatgtaaatgttatataactcaaatatataaaataaatgtgcacctaaaaacaagttcttatagcatgaaaattaaactcttgattttaaaaatattgactaacattgaattcagactttgtgttattttaactcacaatttatttttttaaatctgatagaaatttgtcagaacatatggacttgtaatatctttgctttaaaatatattcatttttatactttagagatatattacttactgacttttaaacttttttttttttttttttttttgaggcagaatctcgctctgtcgcccaggctggagtgcagtggctcggtctcggctcactgcaagctccacctcctgggttcacgccattctcctgcctcagcctcccgagtagctggggctgcaggtgtctgccaccatgcccggctaattttttttgtattttttttagtagagaggggatttcaccgtgtcagtcaggatggtctccatctcctgcctcatgatctgcccgccttggcctcccaaagtgctgggattacaggcatgagccaccgcacccrgccgacttttaaactttttaactagcgatataatattttcagtcttttggccttctgcagctacctttccaaaaaaattgtggaatcttagttaagtgtttcggttgcagtttcctttactgttaccagttacccaaaatagatatatcaatcaggggcctttgttactgtagcagtgttacctcaaataaattcatttaaggccaggggtgttggctcactcctgtaatcccagtattttgggaagctgaggcaggtggattgcttgagcccagttcaagaccagcttgggcaacaaagtgagaacctgtctccacaaaacattttaaaaattaaaaaattagccaggcggccgggcccggtggctcatgcctgtaatcccagcactttgggaggctgaggcaggcggatcatctgaggtcaggagttcgagaccagcctggccaagatggtgaaaccctctctctgttaaaacatacaaaaatgagctgggcgtgatggtgggtgcctgtagtcccagctactcaggaggttgaggcaggaaaatcacttgaacctgggaggcagaggttgcagcgagccaggatcacaccactgcactccagcctgggcaacagagcaagactccatctcaattaaaaaaaaaaaaattaaccaggcatggtggtgcttaccatggtctgtgatctcagctacacgagaggctgaggcaggaggatcacttgagcctacaaggttgagactgcagtgagctgtgtttgcaccactgcactctaggatgggtgacagagcaagaccctgtttccaaaagaaaaaaagaagattcgctttatctggcagatacaaccagaaacaaaaaagcctctcactatggaaaaatgtactaatctagcattcttatactattgtcaggactacttgatatttgaaagaaattattatatctattatatattatattactattatgttatctgaactcttagagaaggtatttggttactaactaaaatcacaacaagatactattatacacccatcagaattgctaaaattaaaaagactgacaccaccaaatactggtgaagatgtggaacaaccaaaactctatacattgtcaatgggcttgtaaaaaggatataaccactttggaaaaagggctggctgttttgtgtaaaactaaacatgtaccttccctgtgacccagcaatttcatttcttggtatttgcccaagaaaaatgaaaacatatatctacgaaattactcacacacgaatttttttttttttttttgagacagagttttgctcttgttgcccgggctggagtacagtgacgcgatctcagctcactgcaaccttcgcctcccgggttcaagtgattctcctgcctcagcctcctgagtagctgggattaaaggcgcccaccaccacgcccggctaatattttgtatttttagtagagacgaggtttcatcatgttggccaggctggtctcgaactcctgacctcaggtgatccacccgcctcggcctcccaaagtgcagggattacaggcgtgagccactgcgcccggccgaacacatgaattttaatatagctttattcatcatggccccaaagtggatacagcccacgtattcatcaatagaagaataaataaactgcagtatgttaataaactggaaaactaatcaacaataaaaagtaattattattgatatacaataatatgatgaatctcaaaaatattttgctgagtaaaagaagccttacataaaagaaaacaggctatatgaatccattcatacgaagttcaagaagagacacattaatctatgatgaaaaaatgagaacagtaggagattgagagtgaggattgactggaaaggaggaggatggaactttctggagtaattatgatgtcctatatcttggtagggttttgagttacataggtaaatgcatttgccaaaattcaatgcatgtatatagaatatgtgttttattatatgtaaattttactaaagcctgtacaaaattttgaattctagttaacaatatgcatatttgcagggggaaatgtactgatatctgtagggtgctttaatatgcatgagaaataagatgcactgatggattgatcaatagatagcaaaatattaatggtagaatctaagtagtgggtatatgaatgtttactgtaaaatcattttcatttttctgtacatttgaacatttgtataatagaatactgagaagtagaaaaaaagcattcgatactctcagaaacaatttttttccttatgtattccatgaagagaagcagagtcagcaataacccctgaaagttaagttgcttgcttattatgtttctggctggatataagttttcacagaaccaatagagatacaactgggtttctttatgttatcatgttattttgttttacatacatatttgggaagttagcttgtttattctcaactcatcatttaaaattctgttagctttggaaggtcgtaaaaatgagatacactgtcattattttcaatatcagaaattcttcctgctatctctgttttgaaaatttacttgttttgtttacggtcatactaccctgaacgtgcctgatctcgcctgaaaatttacttgttctatcacaatttataagaatcaagtatctgggctgggcgcggtggctcatatctgtaatcctagcactttgggaggctgaggcaagtggatcacttaagtccaggagttcaagaccagcctgggcaacatgggaaaaccccacctctacaataaattaaatgtatayayacacacacacacacacacacacacacacacacacacmgacacacacacacatatacatacaaaaaattagctggatgtggttgcacacgcctgtagtcctagctactctggaggctgaggcaggaggatcacttgagcccaggaggtcaagtctgtagtgatctgtaattgtaccactgctctccatattgggagacagagtgagaccctgtctcaaaaaaagaaaagaaaaactgaataataaaaaacagatctgatgaaagttgtaataaaatacattgccgtgaataacataaaaacttaatcttataaacactttgattaaactagaacacaaagtagagataggtcaaggaagatttggtgcagaagataaagccttaggtaacagagcttaggaaataagtaaacgaaaaaaattgtcagtgaaataatggacatattggaagtgcaaaaggagaatacacacttctggaaaacatagtaagggacatgggaagctagagaaaaaaatgagcraaatgaaatggaaattaaccaagtgtttaaaaggaatagagagccaatgtaagatgtagaacatggataaagtagaataattgtctctgaagaataaagctcaatagaaaataatatttaaagattttttaaaggaaactattcagaaacaaatgcagacttgaggccaggtgtggtggcttaagcctstaatcccagcactttgggaggctgaggtgggtggatcacctgaggtcaggagttcaggaccagcctggccaacatagtgaaaccccatctctactaaaaatacaaaaattaaaaaaaaaaaaaaaaaaaaagaaagaaagaaagaaaaaagccgggcgcggtggctcacatctgtaatcccagcactttaggaggccaagacgggcggatcacctgaggtcgggagttcgagaccagcctgaccaacatggagaaaccccatctctactaaaaatacaaaattaaccaggcatggtggtgcatgcctgtaatcccagctacttgggaggatgaggcaggagaatcgcttgaacccgggaggcggaggttgcggtgagctgagatcatgccattgcactccaacctgagcgacaagagtgaaactacatcacaaaaaaaggaaggaaggaagggagggagggagggagagaaggagggaggaagggaggaaggaaaggaggaaggaagaaaggaagtcaggtagacttgaatctatagattgagagagtacatcatgagccagggaaaatgtacatagaacaattataataaggcamaacctagtcatgttattggactccaaaaattaaagaatgattccagaaaaaaagaaaaaaacatatgagagggagaaagatttggacttacttcagaattctcctcagtatgtttcagtgccagaagactgtaggctttatagactttatctatagtcctcaagaaaataatgtgtgatccaaggttttatatctagcttacctgttatttaggtaaaaaggcaacagatgtttttgaacattcaagaactcagaaaatataatttccctgatgcctgtactgtgcccagccagccaaacaagtgataaagaaaatgtcacaaaagaccttatgtgagcatgcaatccataagattcatgtggggcttactattccagaagagaatttacatgttataaactctgacagtgtaggtattaaatgaccccaaagaattgggagggctgggtgtggtagctcatgcctgtaatttcagcattttgggaggccacagcaggaagattacttgaggccagtagtttgagaccagcctgggcaacaaagcaagaccctgtcttttttcagaaataaataaaaataaaggattggaaggataagggtgagagatagtaggaagtgctaaaactagcaggagggccgtgcgcggtggctcacgcctgtaatcccagcactttgagaggccgaggtggatgaatcacttgaggtcaggagttcgagaccagcctggccaacatagtgaaacctcgtctctactaaaaatacaaaaattagccggggatggtggtgcacacctgtaatcccagctactcaggaggctgaggcaggagaatcacttgaactcgggaggtggaggttgcagtgagccaagatcacatcactgcactccagcctaggcaacagagcaagacgctgtctcaaaaacaaacaaaccactagcaggaggatgtactccagtaaaatctaagaactaatttattaacataaattataaaaacaaacaaacaaacaaacatgggatctgggaacaggtgatccagcacagaagggctccgtaaggaagttccaggatatcatttttataccaggcctaggccagggagttttctagaaaaaaataaggactggtttatatgagcatatgaaaaatattattattgaatggcatgccacgatgttggagcttttggaaaaagaatactgataggtatgttggaaacaaagcaaatgaaaaaaataaagcagttaacaactccaggaaaaacaaaatacagtcaggcaccccacaacaacattttagtcaataacaggccayatatacaatggtagtcccataaaattgtaatagagctgccctgctctatatagatgtaccgtttttatgttataccatatttttactgtactttttctatgtttagttacacaaatacttacactgtgttaaaactgcctacagtgctcagtacagtaacacactgtgcactattgtctctaggaacaataggctgtaccctatagcctacgtgtgtagtagactataccatctgggtttatatgagtatgctctatgatgtttgcacaatgacaacatcgcctaatgatgctcttctcagaacgtatccccattaagtgacacatgactgtaattgtgcaagaaaaggagttcttgtataattagtctgctgttcagcagttcacactatttgtatggctataataatattttaaaactcactgatttaaccaaatattgggagaattgagggagaggagagttgtgtatgtgagaacaattactaaaacttcatgttggtgaaatgatactgttaatattgataaagcaagaaatcggaaacaactaagatgccttctaccatggggggaagataataaatctgatatttaatattgataaattaagaaatatcaatataaacattttatttagaaagatggaaacaggctgggtgtagtggatcacacctgtaatcccagcattttgggaggccaaggtgggtggatcacctgagatcaggagttggagaccagcctggccaacatggtgaaactccatctctactaacaatacaaaaattagctgggcatggtggcgggcgccagtaatcctagctactcaggaggctgaggcaggagaatcgcttgaacctggaaagtggaggtttcagtgagccgagatcgcaccattgcactccagcctggaagacgagtgaaaccctatctcaaaagaaaaaaaaaaaaaaggctgggcgcagtggctcacgcctgtaatcccaatgctttgggaggccaaggcgggtggatcatgaggtcaggagttcaagaccagcctggccaagatgctgaaactccatctctagtaaatatacaaaaattagctggatgtggcggcacgcgcctgtaatcccagctacttcggaggctgacgcaggagaatcaagtgcaaccagaggttgcagtgagccaagatcaagccactgcactccagcctgggcaacagagcaagacttcgtatcaaaaaaaaaaaaaaaaaaaaagagagatggaaacagggagaatgactagaagagttgaagttgatagcctctgcagcttagagaagaatggggaagcgtctttcattataagtcttgtaatagtacaatttgactttttaaaggaggtgactacaatattttgacaaaaataaaaataatttaaccaataagggattatttctctgtgtgtagtgtgcacaaaaagttatgtaaagctatttactgaagcattatttatttggtattaattacaaattatatcctgtaggtaacaactcaagattatgttacatggtacactgttttgtaaatatatttattttctactcttaaggaacattcattctaaggagttagggaatggcttaaacatatataaatcagaaaaatagtagtttacccattcagcaaatatgtattgagcactgtgtgccaggcactgatctgggcactagacatcaaaaagagacaaaagcatctgcagtctagtggaggagcaatggagacataaacagtaaacataataaaaatggtgtggccgggcacaatggctcagcctataatcccagcacttttggtggccaaggcgggtggatcgcttgaggtcaggagtttgagaccagcctggccaacatggtgaaaccccatgtctactaaaaatacaaaaattagctgggcatggtggtgggcacctgtaatcccagctactcaggaggctgaggcaggagaatcgcttgaacccaggagacagaggttgcagtgagccgagatcatgccattgcactccagcctgggcgacagagcgagactccgtctcaaaaaaaaaaaagaaaataaaataattttaaaaatggctagactgggccgggcgcggtggctcacgcctgtaatcccagcactttgggaggctgagacgggcagatcacaaggtcaggagttcaagaccagcctggccaacacagtgaaaccccgtctctactaaaaatgcaaaaattagctgggcgcagtggcgggtgcctgtaatcccagctactcaggaggctgaggcaggagaatcgcttgaacccgagagacggaggttgcagtgagctgagataatgccacgcactccagcctgggcgacagaactagactccatttcaaaaaaaaaaaaatggctaggctgtattagaagttgataatgtctatgcaaaaagaaaaagacatacggcataagaggattcggaagtgcaaggagaagaggaggaactatcaaaggagactgagaagacagaaccctgggagtatataggagaatgtgacgttacagaagcttagagaataaagatcatgtcaaggtagacgacatgatcagtagccaaatgctcctgaatgaagtggacctgagaatagactattggatttagcaaaaggaaggtcacttatgtgatgttgacaagagctgtttcagtaaagatgtgctatctaatttcttctcgtcatggagaaaggatgacaagaaagatagttaccactaagccctcttatttttgtgatcttatagcagtagtcatagtttgatctttggtaaatttgtaacatctagattgctattcacagaagacttaggataactttggttttgcttggatgtgaacctgatcagtgtgagcaaatggttggtaagattatactgttagcagcagtagggaatgagatttcttttttttttaaattttattattattatactttaagttttagggtacatgtgcacaatgtgcaggttagttacatatgtatacatgtgccatgctggtgtgctgcacccattaactcgtcatttagcattargtatatctcctaatgctatctctcccccctcccsccaccccacaacagtcctcagagtgtgatgttccctgggaatgagatttctgttgtgaaccccaaacccagaactgcaggaactagtcctttggtagattacattatttagttgtagaaaaactaatgaagagaatcggtggtgtgtgggcattgcaatcagttgactccacgtggcattcctagaggttgctatagaaagaaagaaaatagcttaaattcagccccaattttaattccatatagtccactaagaaaaagaatactaagtcaggtggagaacttgccttcattatttttagcttaatgtgttattctagatttagaatacctatgattaactgggatgaggggatgatcagaaattcaatatttaactgctgtcatcctagcaagggcatactgagtagatagcatcatcataatatgtgggctgagatgaggctgctccagacgagtctctctcmaagttaattgatggaaacttcccaccttcaagaatttttattaccttagcaatgctatgccaagactgttgaaacacagctgtgggtgctgtgcagacgcccacattgccaatgtcaggaaggatgtacttttaaacctctaatttatctaataatgtcgttagtgatttgtgtaggtttggcattgtgatgaaaatgcttcctggcttggtttataacaagaattcagtttgcagtcttaaaatgtatattgtcttaatatgcatgtggaatatactaacaagtcaatacaaaaagatctgaataaaatactatcctgtccatctaaaggaacttattatcaacccatggtatttgaaaatgaatgcaaattaaatgtttttattcagtaataatctatttatctgttgtggttcctgctttataacaagatggcaatattcagtgctgaaagagagccagctttcatattcaatccaatctgactcctttcctattctctaatggaaaatacgaattgattggattgatgtcagcctatatagtggagatggaataataagctcttgtaaggccgggcgcggtggctcacgcctgtaatcccagcactttgggaggccgaggtgggcggatcatgaggtcaggagatcgagaccacggtgaaacctcgtctctaataaaaatacaaaaaaaaaaaataaaataagctcttgtaaataaatattttaaaagaggtaggaaacagtactttcttgtttcaaatataaaattttatagtaacaatattgttttatatgacatttatcatgtaggcctgtctcttttttttttttttttttgagatggagtctcactctgttgcccaggctggagtgcagtggtgccatctcggctcactgcaacctycacctccccagttcaagcgattctcctgcctcagcctccccagtagctgggattacaggtgcccgccaccacgcccatctaatttttgtatttttagtagagacggggtttcaccaccttggccagnnnnnnnnnnnnnnnnnnnntgctttataacaagatggcaatattcagtgctgaaagagagccagctttcatattcaatccaatctgactcctttcctattctctaatggaaaatacgaattgattggattgatgtcagcctatatagtggagatggaataataagctcttgtaaggccgggcgcggctgacgcctgtaatcccagcactttgggaggccgaagtgggtggatcacaaggttaggagctcgagaccatcctggccaaggtggtgaaaccccgtctctactaatagtaaactacaaaaattagctgggcatggtggcaggcacctctaatcccagctactcaggaggctgaggcaggagaattgcttgaacccgggaggtggaggttacagtgagccaaaatggtgccactgcgctccagcctgggcaacagagtgagactccatctcaaaaaaaaaaaaaaaaaaagaaagaaagaaagaaaagaaagaaagaaaacaaataatacaaaatgtgaaggattctttcctaactaatggattcactgcaaggattgattgcatttatcaaaataaatatacatttaatgtttcagaatacacccacagcataaagcagaatattcctaattatttatagaaggaatatatagcatttgtttctaccccactggactatgtgaaaacctttggatctgaagtgtgtttacacttttaagctgcctttgtcccatctttgaaattaaaaaaccttatttggaatagaattatagaagtagaattttaggcctagaattgactttagagttattttattctaacttaattttctagttgaggaaattgaaatccagggactttaagcaccttttctaaggttacccagctataactagaacccacctttctaactccttatatttctgctctaatttcttgtctccaacaagttagtcaaatagtaattaaatggtaagttggcagaagttttaggtctctcgtgtgtgtgtaactatgtattttcaggctccaaagtcaatagtggtctgtaattattcttcatatatatatgtttttatctttgtcattacatggagaaatcagtgtttaaattataagttaaagtgatttctgagtatctgaggtatctatgaatacataaataatagtctttaatatctacatataggtaacaaggacccatatataattaagtcctgcaagcactataggtgaaggaaatgctaaggattctcctatgactgggccccattatgaaatttaaagaaatcagtacttatctagagcataagaaatgaacatgctcagtactcataggctgtctatgctgatacactaattctttttttttttttttttttttgaggagtttcgctcttgttgcctaggctggagtgcaatggcgcgatcttgactcactgcaacctccacctcctggattcaagcgattcttctgcctcagccgccagagtagctgggattacaagtgcccaccaccacgcccagctaattttttgtatttagtaaagagggggtttcaccatgttggtcaggctggtctcgaactccggacctcaggtaatccacccacctcagcctcccaaagtgctgggattacaggtgtgcaccaccacgcctggcccactaattccgataatgacttggatagttcccataatgatttaacatctgtctcctgcttcaaccctgtccccagatactaaaacaaactaaaataatttgtgtaagtaaagtactgacctattgaaggttattagaatgcagttacatttttataattcaaaatcttccaccaagcatgttttcagctgtggctatttttgaaatagaattgaggaagcaagataaatatttggaggataaagatgatgctagccaatatgagctgcaggaaagaacagtcagaacattcatgactataagttttgtgggggttttatgtgtgtttgtagaacacttactgttagcttaaagcaagcaagaccccatgctttgtttacaaagctcaatttatgaagtttaagtagagcctggatttttgttttacaattcataacatcaagaaagtcagtatacacagaaattcatatatgtattcatgaacataaatagccttaatgaagtggaacgtgttacttatgtgactaaacttaaaaattaaaactaaatgggcccctaattaatgattttcaacattgtttaaaaaatatttatgtatataatttttatatgccttagacataaaataggcaaagattttatttccgtctatgaatatataaaattagtactttgatacctaaaacaaacaagaaaacatcaaattggtatgtatggaaaaactttccttttgttctcaggatgtgaattgcttgaagataaaaatggaaagcacttcaaaatatctgtttatatacataaaaagaaaagcattattcttggactatatttgagagtcctaacaagattaatttgacttggacacagagtcccccaaaatgatactgcaaatattaaaggatttctaatcatattgcagttcagcagtgttctcaacacaatgacatttataaacctagtactccaaactgccatgagtattggctctcttttgatatttgctatgcttattacatttgccgaactttaaaactttctgtatcaggatctttcaagtattttaagagaaatgatgaaagaaagcagcttgctatgttattatcatgttagtcactcctagtgattctcttcaaatgacaagcattagtgataagcttttatttgaggtgtatcaaatattctctgatgtgactgctctaaaatatatttgcaattctgatttttcagaaataatcacttccaactcaaagtcaaaaccataagaagttattcatgctaagtgttacagctttctgacatgtaggaataactgatgtgggtgaagcatctagcttaatgttttatatctagctattagtcagctaatcctcctccctacttcactgaaaatattttcattctgtctgacaaaaggtaaaaaaattatattaactgtgactaaaaatgtattgcagatgacacattaatgagactaatggttcttgccttattctctaaagttttcatttcttacatttgttgaacctacatccagatagtttaataattacacagaagatatccttttcttttggaactctaatggaacaagattacaataaaggttttcagatcatttttgttttttgggtttttttttgagacagcctcactccattaccccacccaggctggagtgcagtggtgtgatcgggactcactgcaacctgcacctcccaggttcaagcaattctcatgcttcagcctcccacgtagctggggttacaggtgtatgccaccatgcgtggctaatttttgtatttttagtagagacagggttttgccacattggccaggctggtctcaaactcctgacctcaggtgatccacccaccttagcctcccaaagtgttgggattacaggcgtgtgccaccacacccggcccagatcatttttaatgtaaatttaaaaaacaacccagtaaattccataactatatactaaaaattcatataggtaaaacatttggaatgtgtccagttaatcagagtaagacatgacagaaaggtaaagataagcgatttttacagagattaggtctgtgaagaaacattttgactcatcaaaattcagttaatttccatagcatggaaggagacatggtaacattgtttataaagcatttggattttaaagggatcccatcaatttatttaataattgttaaagggtagtagcttttaaatttttttcatcataattcagtatatacttacctacatatatatgtgaaacaatgctttacctcatgcaccttattctatttcctttaaaaaatgctggtcatgctgggtgcagtggctcacgcctgtaatcccagcactttgggaggctgaggttggcgggtcatgaggtcaagagatcgagaccatcctggccaacatggtgaaaccccatctctactaaaaatacaaaaattagctgggtgtgttggtgtgcacctgtagtcccagctactcgggaggctgaggcaggagaattgcttgaacctgggaggcagaggttgcagtgagccgagatcatgtcactgcactccagcctggtgacagagcaagactccatctcaaaaaaaaaaaaaaaaaaaatgctggtcataggccgggcatggtggctcacacctgtaatcccagcactttgggaggccgaggcgggcagatcacctgaggtcaggagttcgagtccagcctggccaacatagtgaaaccccatctctactaaaaatacaaaaattagctgggcgtggtggcaggcacctgtaatcccagctactcgggggagtgaggcaggagaatcgcttgaacctgggaggtggaggttgcagtgagccaagatcgcgccattgcactccagcctgggggacaagaccgagacttcgtctcaaaaaaaaaaaaaaaaaatgctggtcataattcatacattaatttcattacccactaatggatcataaactgcaatttgaaaaatactgatgaataatagctgggtgcagtggctcacacctgtaatcccagtactttgggaggctgaggcgggaagatcgcttgagagtaggagttcgagactagcctgggcaacatagtgagactatgtctctaaaaaacaaaaaacggggcatgggtcatggtggcttgcacctgtagtcgtagctccacaggaggctgaggtgggaggattgcttgagcccaggagtttgaggctgcagtgaggtatgactgcatcactacactccagtctgggcaacacagcaaggctctgtctcaaaaaagaaaaagaaatattgatgaataataaaataattttctaattttttttccttgaagacatagaatgtaagcattgccattttatatgttcctgaaccactcacttatttggactcatctagaccttgttatcaaaaattgcatcagctcacaaatcttgtacacaagcatcctgctctcagacgacaacattctgccctagattttgtgcccaagtactcccacctacaattctttaattacatttagaccacactgatttacaactcaagtctgttctttaagatttgtgggggtagggggagggatagcattgggagatatacctaatgctagatgacaagttagtgggtgcagcgcatcagcatggcacatgtatacatatgtaactaacctgcacattgtgcacatgtaccctaaaacttaaagtataataataaaaaaaaagaaaaaaaaagatttgagtatcttaaaaagatactcaattctgcctgatgcagtggctctctgtaatcccagttactcaggaggttgaggtgggaggatcccttgagcccaggagttcaaggctgcagtgagctatgattgtgccactgcactccagcctggaaaacagagtaacactctgtctctaaaaacaagtaaaaattttttttaaagatagcaatctctagccaaagatgattgaataaaataaaaagtgaattaaaaaaaaaagataacaaatctgcagggggcggaaattgcagtgagccaagatcgtgccactgtgctccagcctgggtgatagagtgagaccctatctcaaaaaataaaaattccaaatctccatttctcttcttcgctttatagtactaccttgcaaaaccccaaatccttcttgtcagagacatttctctaaaacttaaataaaaaacaaaacaacaaaaaaaacacacaaataaaacaaaaaccaaaaatgaacctcgaataaaccgccaatcttgtgacacttgatgaactaaatggttctttctacctacgcatgtgccaacatagatgaaaaagtcatgccatcagaaaaactggtttcatttaaaaattatctcaaacttcccacagtctcttagcactgtgtgacagtcctactactctctgatatgacgatttcatatctgctctgacttcatccctcctccttcctttctaccctcatgacctagtttgtgatttaacctagtggctctcaaaatgtggttcccagacccgcagcatgagttcatatttaacttgttaaatatgaagattcacaggcctcacatcaggcttattgagtcagaaactctgtggatggggcccagcaatctgtgtgctaagaagccctgcaggtgattctgatgcgtgagaaagttttgaaaatgaatcttgcctcatacttcattgagaagcccttctttagaatgtaagctctaagagggcaggggttttttcttttttgtttatatataccctgagcactagaacagtgcctggtacatagtaggcctcaataaatatttgttgtctcaaatcattaaatgggaatacccgtcgtttcctactaacatctaaaaacatacctgcatctgtactgattttcttctttttccaactaaggaaatgtgcctcatcctacagtcagattctacaccattctaaaacaacaacagactttccctttcccctatcccctatcagttactgccccatatctctgtttcccctctgtgccaaacctccctgccccctactcagtaattaacccattctagcctgattttcacttccactattcagtagttcttgacaaagtcagtagtttttttattatctttattgagatataattcgcataatataaaatttacccatttaaagtttacaactaactgatcacaaccagtcataggtttctttgttccttctctactcccactgcttcacatgacttgcctttttaaaaaagtgtacaattcaaggattttaatacagtcacagttgttcaaccgtcaccctaagttccagaaaattttcatcaccccagaaagaaaccccctacctattagcagtcactcctcattcccaccacccctccagccctaagctaccactactctctgcttctataaatttcctattctgggcttttcatataattattattatagaattataaattctacaataagtggtctttgtgactggcttctgttgctatccataatgttttcaaggttcatccacactgtagcatgtataagtgcttcattcttttttatggctaatattccagtgtatgaatatattgcattttatttatccatcaagtgatggacacttggttgtttttactatttggcgattataaacaatgctgctgtgcacattaatgtatgagttttttgtgaatatatgtttttatttctcatgcatgtatacctaggagtggaattgctgggctggccatatggtaactttatgtttaaaatgttaaggaagtgccaaagcagctgtaccactttacatctccactaggaatgtatgagagttccatttatccatatagttgccaacacctgttattactaattgtcttttttgttatagctattttattatagctatcctagtggatgtgaaatggtttctcattgtggttttgattagcatttccctaatgactaatgatgttaaaaggggaagaaaaaaacctgtttttctgtacagtcacacacttctttttttttttttttcgagactgagtctcactctgtcatacagactggagtgcagtggcatgatctctgcttactgcaacctccacctcctgggttcaagcgattctcctgcctcagcctcccgagtagctgggattacaggcatgccaccacactcagctaacttatgtatttttagtagagacggggtttcrtcatgttggccaggctggtctcgaactcctgacctcaggtgatcgtcccgccttggcctcccaaagtgttgggattacaggcgtgagccaccttgcccagcctcacacacttctgacactaaaagtgtgtggggttttcccaccaaccaattctccatttctccctggacatcaattaggtgtcttacaatttaactcaattctgacactaattgcctggagttacaacagatcccacaggataacgggctcagtcctgcaagatgccccacctcagatgccagttaaaagtctggacctcccaaacttctgaccaactggttataaatcaaggtttcctacaaccttctcccaagttaaataatttgctataatgtcttacaaaattcagggaaacattcacttatgtttactggtttgtgaaaggatattataaaggatataaatgaacagccagataaagagagatatacagggtgaggtcctgaaggggaagggtctcaaacataataggttctgttggaggtggggtatgccacccttctagcacatagttatgttcatcaaaccagaagctcccaaaatcccatcttttaaggatttgcatggaggcttcatcacgtaagcatgttcaaataattattaagtcaatctcccatctctctcccttccctagaaaatgggaatagggttgaatattccaggcctcttattatgggttgatctttctgatgcccagttgccatcctgaagctatccagtagcccaccaagaactgcttcataagaccaaaaggcactcatagactatacaggaaattccaagggatttagaagctctatgtcagaaaccaggttcaaagactaaatattagaagatgcttccagtaccccgtcactcaggaaataaaaagggttttaggggctctgtgtcaggaaccaaggcggaggacaaatatttatttccaattatgtcacagatgttgcacatcttttcatgtgcttattgcccatttgtatatcttctttggaaaaaagcctttgggttgtctttttattattgaaatataaggattcgttacatatttgggataccagtctcattagatatatgatttgcaattttttgttttgttttgagacagggtctctctgtctctcgggctggaatataacgatgattatggctcactgcagccttggactctgggcttaaagcgatcttcctgcctcagcctcccaattagctgggactacaggtgtgcccaccatacccagctattttgttgttgtttgttttgagacagggtcttgttaagttgcccaggctgatctcaaactcctggccccaaccttacccccttgcaaagtaccaaaattacagacataagccactatgcctggcagatttgcaaatattttctaccagtctatgggttgtcttttcactttactgatttgtgatacaaaagttttaaattttgatgtagtccaatttaatattttttttcttttctgcttgtgcttttggtgtcagagctaagaaaaccattgcctaatccaaggtcatgaagatttactcttttaggagttttcttttaggagttttatgagttttagctttacatttaggtctgtgatgcatttggcattaatttttgtatatggtgtaaggaaggggtccaacttgattattttgcatgtggatatccaatttttccagcaccatttgaccattttgttaaacagaaagttattttcctttttcctgttttttttttttttttttttttttttagacagycttgctctgttgcccaggcttgagtgtgatctgcccacctcggtctcccaaagtgttgggattacaagtgtgagccacactcctggccttttttttttttttttttttttgagacagtcttgctttatcacccaggctggagtgcagtgacgtgatctcagctcactgcaacctctgcctcttgggttcaggcgattctcatgcctcagccacccaagtagctgggattataggcgtgcaccaccacacccagctagtttttgtatttttggtagagacagggtttcaccatgttagccaggctggtcttgaattcctggtctcaggtgatccacccaccttggcctcccaaggggctgggattacgggtacgagacactgcacctggccttttttttttttttttcacttatttgacctctcagcaattgacagagttcactgctccctccttcaaatactctctactatctcggttctccttttacagattttgccatttctctttagtcttcataggtcccttgtcttctactaagcttctaaatattgggttttcagttattgtcactgtattgcaaattaccacaaaacttagtggcataaaacaattatttattatgctcacaatgtctttcagtcagaaattaaaactgggtaaagcaaggtcaccttatctctgttccaactggggtctctgttggaagactcaggctgggggactggaatcatctgaaggcttgtgaacttacatgtcaagcaattgataatggctactgcctgggagacctcaggctacatccacatgagcctgttcatgtggtttctccacatggctagtttgggcttcctcatggcttgatggcttggctgagtatgaagagcaagtatccagagggagacagaggaagaaagaagaggaagccgggggaagccacgtggccttttatgaacaaacttcaaaagtcacacagtatcacttttgctacatttttttcatccgagtagtcaccacacctcacccatgtttagattaggaagggaaacagactctatttttttatggggaatggcaaagttctaaaatagcatgcgggaccaggaatgctgttgcggcctttttaaaaataatctgccacagtcttttctggccacacaattcacatccttcccatgtgctaaatgcactcacccaacatcccctaagatttcccaaagtctaatcccattatggtattaggctgaagcttgaggtccaagatttcattgaggccaagaccatggcagataagatttcttatctggcaagtaaggtttcttcctttaaaaaaaaattctccaatgagagtttaatttttatgtttatcaaagtgtatactatattagatcatttgtgtaccagtagttacactgataaggcaatgaaaaagaaaatgtttaacgctggagccttatggtcacagaaagtttttaaaaatttaatttcaattttcatacatatttttactgcagagacatattatatactgctttggctgagtcccataggttttggtatgttgtgtttctgttttcatttgtttcaaggaattagtcaatttccttcttaatttctttcttcacccattggttgtttaggagcatgttgtgtaatttccatgtatttgtgtaattttgaatgtttcacttgttattggtttctagttttattccatagtcagataagatacttgatatgacttcaattaaaaaaatttttttagccttgttctgtgtcctaacatgtagtcaattctggagaatgttccatttgctaataaaaagaatgcatattctgcagctgttgggtgaaatgttctgtaaatgtctgttagagctatgctatggtttatctgatgtttccttgttgattttctgcctagatgatttctgcaatgctgagttgggtgttgaagtccccagctgttattgtattggcatctgtctcttcctttagatctaatagtattttctttatgaatctgggtgtgctggtcttaggtgcatgtatatttacaattgttatagcttcttgaattgtttccttaattactatataatgtccttctttgtctctttttatagctttcgacttaaagtctgttttagctgatataaatatagcttttcctgcttgcttttggtttccatttgcgtggaatatctctttccatcccttcactttcagtctgtgtatatccttatagatgaggtgagtttcttgtagacagcatatagttgggtcttgtttttgtttttgtttgtttgctttgttgttgttgtttaaattcattcagccagtttcttttaattgggaattttaaccattttacattcaagattattattaatagatgaggacttactccagacatttattgactgttttctgagtattttgtgtaacctttgttccttcccctcctattatttatttttgtggttgggttgttttctgtagtgataagattatttattcctttctctttcttctttctctgttggctctcctggtgaattttataatttcacatatcttcatgagggcagttatcatctttttatttccagatgtaagacgcccttgaacatttctcttggactagactagtggtgatgaattctcttattttttgcttgtccaggaaagattttatttctccttcatttttgaagaatagctttcctgggtataatattcttggctagctgagttttttttctttctgtactttgactatatcatccctttctctcctggcctgtgaagtttctgctgagaaagctgctgctagtctaatggagattcccttatatatgacttgatgcttttcttttgaaaaggaattctcttttagaattatttctttgtctttaccttttgacaatttgacagctgggtgtggtggctcatgcctgtattcccagcactttggaaggccaaggcaggtggatcacctgaagttgagagtttgagaccagcctgaccaacatggtgaaaccctgtctctactaaaaatacaaaaattagctgggcatgatggcgggtgcctgtaatccaagctactcaggaggctgaggcaggagaattgcttgaacccaggagacaggttgcagtgagccgaaaattgcaccattgcactccagcctgggctacaagaatgaaactctgtctcaaaaaaaaaattattttttgactataatgtgccttagagaagacttgtttgggttgaatctatgtgggaactttccagcttcctggatctgaatatctgtgtctctcccaagacctacgaagttttcagttattatgtcattaagtatattttctacaccatctctcttttcttctccttctggaatgcccataatgcaattatttgtttgcttaatggtgtcccataaatcctatatgctgttttcattcttttttcttttctttctttttttttctgcctgagttttttcaaaagacctgtcttcaagttcaaaaattttttcttctgtttggtctagtctgctgttgaagctctttattgtattttttatttcattcattgaattcttcagctctaagattcctgtttggttctttttttttttttttttttgagacggagtcttgctctgtcacccaggctggagtgcagcggcgtgatctctgctcactgcaagctccgcctcctgggttcacgccattctcctgcctcagcctccccagtagctgggactacaggcgcccgccaccacgcctggctaattttttgtatttttagtagagacggggtttcactgtgttagccaggatggtctcgatctcctgacctcgtgatctgcccgcctcggcctcccaaagtgctgggattacaggcgtgagccaccacacctggccggttcttttttaatgatatctctttgttgaatttctctgatttttgttaactgttctatatgtattctcttgtatctcattgcgtttccttaacatgattattttgagccacatgtgatggctcatgcctatagtcctggctccttgggaggctgcagcaggaggattgcctgagtccaggagttctggcctatagtgcattatgctaatctggtgtctacactaagtttggcatcaatatggtgaccttctgggagcagagaaccatcaggttgcttagggagggatgaaccagctcaggtcagaaatagagcaggtcagccaggtgtggtggctcacacctataatttcagcaatttgggagactgagatgggtgaattgcttgagcttaggagttcgagaccagtctgggcaacatggtgaaacctcgtctctacaaaaaatacaaaaattaggctggtggctcatgcctgtagttccagctacttgcgggggctgaggtgggaggattgcttaagcccaggaggtggaggttgcagtgagccaagattgtaccactgcattccagcctgggcaacagagtgagactctctttaaaaaaaaaaaaaaaaagaaagaaaaataaatggagcagatcaaaacacatatgccaattaacagtaggatgcctatgaatagccactgcactccagcctatgcagtatcgtgagaccttcatctcaaatttttaagaaaagattattattttgaattctttttctggcattttatatattccttacgattggggtttgttcctggaaaattattgtgtgcatttggaggagtcatgtttcctcaatttttcacatttgatgtgtccctatgttgatttctacacatctggtggaacagtcacctcttccaatcttatggagtagttttcatagggaaagatttagtcatgtggatgggtcttggggcatcagttggatggctgcattggctatggttctaggtggacacagtgttgtagtttcttttgctgtaatctgcactagtgatgtttgtgagtatcccaatggcctaggctgttagagtttatggcagaagtcatgtagctttactggggttgggaccattggactatttcttaggtcagggacatgtgcatgcacatcatgggttgaccagcttggggtctagcttgctgaggctgtggccatggactgttactctggctgggggcacatgtgcatggctgcccagcttggaggtatgacagcctggggtgggacctccaggctgttcctcttctgggtgcaggcacacagtttcttggccagcatggggtcatatccactggaagaagacctgccagcctgtttctcaggccctgggcatgggcaggcctagggtcatggcctccaggaatgggcctgtgaggctgtttatcaggccacaggcatgggaatgttactgcttgggggtgtgcctgctggcagtggctcacagagctgcttctcaggcccaggacacaggcacatggctgcttggatggcccagggggatatctgccaagggcagcccgtggggctggagtactagtttctttgttttctttttgtttgtttgttttgagacagagtcttgcactctgggctggagtgcagtggcatgatctcagctcactgcaacctccacctcctggattcaagcgattcttctgcctcagcctccctagtagctgagattacaggttcccgccaccacacccagctaatttttttgtatttttagtagagacagggtttcaccatgtaggccaggctggtctcaaactcctgaccttgtgatctgcccacctcagcctcccaaagtgctgggattacaggcatgagccaccacccccgacctggagtactagtttcttaatgacagctccttaactattgttccacttgactgaaaacctatgagctaaaaaggccatttatctactccctttcccgctgtaacccaatatacccaatatggtgtggcataggataatcttctcgttcccagagggggaaaccaggaggcacatagagatcactgatctagagcaattctctttttatgttttctccctatatgcttrtcttagtctgctttgaattgctataaaggaatacctgaagctgggtaaattataatgaaaagaggtttatttggctcacagttctgcaggctatacaagaagcatggcaccagcatctgcttctggtgagggcttaagaagcttccactcattacagaaggcaaaagggagccctcatgtggagatcacatgttgggaaatgagagagaaaggggaggaggtgcccagctctttttaatttaataatcagatctcacaggaactaatggcacaaaaattaactcattaccacaaggactacaccaagccattcatgagggacctgcttccatgacccaaaccaggccccaccttgaacatcggggatcagatttcaacatgaaatttgaaatatccaaactatatcagtggtcttttccatttccgtagctttaaatatcatccatacatttgcaacttccaaatttcctaacatctcaaatgccagactagaatatccaggtaaccatttgacacgttgactaggacatctcagatatttccatcttttttttttttttttttgagacagagttttcactcttgttgcccaggctagagtgcaatggcacgatctcggctcaccgcaacctccgcctcctgggttcaagtgattctcttgcctcagccttccgagcagctgggattacaggcgtgtaccaccacgcccagctaatttttgtatttagtagagacggggtttcaccatgttggccaggcaagtcttgaactcctgatctcatgatccacccgccttggcctcccaaagtgttgggattgcaggcatgagccaccatgcccagccaatatttccatcttaacatgttaaaatgaattcttgatttctactttaccccacttccttcacaaacttgttattttcctggtttccccatcttggcaggtgattctactattcacctagttgctcagaccaaaacccaggactcagacttctttactttctctccctctctcacctctacatccaatcatcaacaagttctatatttttttctcactctttttcttctcatctgggttataacaacttccttattggttaccctccttcattcttgctcccttctaatttcctttgatatagcagtcaaagcaataatttaattcatatgtctgacgatggcactgtcttggtcataatcttctgtgaattcttattaccctttgaaaagaatagaaattccttaccatcacctaaaaggcccatgtatctggtctttgtctgttcctctgactttattctgtgccactttcccctcacccactatgattcacttcctctgggtttctttcagttccttagatataacaagctctcaaaaggttctgtattggccaggcgcagtggctcacacctgtaatcccagcactttgggagactgaggcagatggatcacctgaggtcaggagtttgagatcagcctggccaacatagtaaaaccccatctctactaaacatacaaaaattagccaggcatggtgacatacacctgtagtcccaactactcaggaggctgaggcatgagaaaatagtttgaacctgggaggcagagattgcaatgagccaagattgcaccactgcactccagtctaggcaacagagcaagagtctctctcaaaaaaaaaaaaaaaaaaaggttctatataaattttattccctctgcctggagtattctctcctaacttcccactacgacataactgagtctttttcatcctttaaggtatggcattcctgaccattctatctaagttcatacccctctttattattctctgtcattgtatcctgtttgtttcctctataaaacttatcctggtcttggtgcagtggctcatgcctgtaatcccagcactttgggaggccaaggtgggcggatcacctgaggttgggagttcaagaccagcctgaccaacatggagaaaccccgtctctactaaaaatacaaaaattagctgggcatggtggcacatgcctgtagtcccagctgcttgaaaggctgaggcaggagaatcgcttgaacccgggaggcagaggttgcggtgagcccaaatcacgccattgcactccagcctgggcgacagagcaaaactccatctaaaaaacaaacaacaaacagaaacaaacttatcctgcttttaagttatatcctattagtttgtcatctgtctgtagctcctttaggtaaggagccatgtctgtgttatgcatcaatatatatccagtgcccagagtgcctactcaataaatatttattgaatattgtttaaaggtataattttgttttgagacaatgttataattaatatgtaattattataacgttaaatgtattactttctaattcttttgctgaaaatggccttttatcttttttcttgcagtaattgcccttcctttttggctgctgctttagccagagccacatcagatgaagtccttcagagtgatctttctgcacattatatcccaaaggaaacggatggcacagaagggactgtgggtgagtacctttctacattatttgtttaaaaatactagaatcttctatatgtagtggtccacagaaaatatctgcaaaatactaaatctaattacatttacctgctggttgtttatgtagtggtagcaggggagaaaaaatgcaacttttttcaaataaatcaataaaaggaagggaagaagagaaaaatacatgtgtattttgaaaaaggtagagtagtatttagaaggtaactggagcaacaggagattgtcataagtgatacctacatgaatggaaagattaaagtgaggaatgtgaagatattacaaaaaagatgagtgggtgagggagaattcgagcaaaacctatttgaaatgtttagcttacctttaaaaatccaagttaggccaggcgcagtggctcacacccgtaatcccagcgtgagaggctgaggtgggcagatcacctgaggtcaggagtttgagaccagcctggccaacatggtgaaaccccatctctactaaaaagaatacaaaaattagccggtgtagtggtgcacacctgtggtcctagctattcgggaggctgaggcaagtgaattggttgaacccaggaggtggaggttacagtgagccgagatcacgccactgcactccagcctgggagaaagagtgaaactctgtctcaaaaaaaaacaaaaaacaaacaacaaaaaaaaaaaaccttaactttgtatcaagttaaaagatacaaaaattcaagaaatcagttgtaacacaacttctcactaattatattaaattttatatctaccagtaaatagagctctttatgatagatatgcaaatgtgatttaattgcataggtcattgtacatttttttccagataaattatgaggctctatttcttaatgaagtcatgtttattaatgtcttaggcttatacatatttgacaggatcaaagaaaatatttttataaaaatcagagaattactactcaaaattgttaagaaattttaatatttcatacggtttgttctatttaaagcatttgcctttaatcatggtatatatggagcaaagcatatgttaatgaatctgagtagctagattgaagagaatgtgaggcaaatataaaagtaaacatttctgttcttcctttatctctgtagattgtttgtgacagaaaatcggcaaggaaggaattactcttcttgtttttactgacagtaactgattcacctagaaccaaattgttccagagtcaagttggatagaattcttgctataaagcattggtttttcctctgctactgatgcatagagtaaaagccttataatgaaaagatagattaaattctgcttcactccagccagggtaatggctgattcaactccagctcagaacaatgacattaatgactgatgagtaatttacagctgtgagggggtggactgctactttggacagttttttgcatccctttattattttatttttccatttcaagcagcaattatttatatactgatgtcttacgctactccctgcagaaggagaatacttaatctagaaagattgcagtgttgccctacatgcctactttggaagaattttttgatccctttaagatagcaaaagtgaaatgaagtgttttcttttggtggatataattggttattctgattttttatttttccaagagattacctaataatgtctccatacgactgctgtgattcagactgatctactattattctaaactatttggaaatcttgtatttatttaaccccaatcacttagtgtgaactgcaccacagagaatctctatggggcatattgtgtttatccatacatcagagtaggaaatgagcatactgaataagacctgctgtcactggcttaaagtcctcactgaagtgccttttgtctctcctcttggttgtttccaaaaacagtcttaaaaaaaaaaatccttaaatttcttttcatgtttacattatccctaacagaatgtttgctaagtgaccttggatatctcacttggtacacatttagtttggtagatacaacttttgtccagacaacctaaaaccaatttgagggccagctgttggtgactcatgcctgtaatgccagtgctttgggaggccaaggcaggaggatcacttgaggccaggagtttgagaccagcctgggcaatatagtgaggcactgtttctacaaaaaatttaaaaattagctgggcatggtggcatgcacccgtagccccagccacttgggaggctgaggtaggagaatcacttgagcccaggagttcaaggttacagtgagctgtgtactacaacccggtcaacagagcgagaccctgtctcaaacaatgacaacaacaacccaaaaaaccaatttgaaatatcacagtgtaaaaattattatttttatttttatttttatttatttttttttttagagagagaaagggtctccctctgttacccaggctggagggctgtgggatgatcacagttcactgaagcctctacctcctaggctcaagcaatcctcacacctcagcctcatgagtagctgggactacaggcatgcatcaccatgctcggctaatgtttgtattttttgtagagacagggtctcgctatgttgcctaggctggtcttgaactcctgggctcaagtgatcctcctgccttggcctcctaaaagtgctgggtttatggtcgtgagccactaagcccagcctactgtaaaaattaaaaacaagaagggaaaatgatcactaatacagaggaaatttaaaaataataaaaagtttttgtaaataaatttgaaaacctggatgtcttctagaaaaaaaaaataaattaacaaagtttacctaagaagaaagagattgagaaaattatcgagggacagtcctcacaaaaggccatggagtaggtgactctacaagtgaggtgaacattttcaaatgcaaaggcagataattccaatggttttttttttattatatagttatttatttattattttttgagcagagtctcgctcttccttcaagaatcttcctcccaaaatgctgggattacaggcatgagccactgtgcccagccccaatcccttttaaaatgaatgctccaactgcacggaaaaagaaggaaaatttgcataacataacactgataccagaacctacccaagactaaaaaaggaaatgagagacgagtcttagttgtcaacataaaaaaatcttaagtaggcctggtgtggtggctacgtctgtaatcccagcactttgggaggccgaggcaggcagatcacctgaggttgggagttcgagaccagcctggccaacatagtgaaaccccatctctactaaaaatacaaaaattagccgggtgtggtggcgtacacctgtagtcccagctacttgggaggctgaggcaggagaatcacttgaacctaggaggcggaggttgcagtgagccgagattgcgccattgcaccccagcctgggcaacaagagtgagactccgtctcaaaaaaaaaaaaaaaaaaacgactcatgcctgtaatcccagcactttgggaggctgaggcgggcggataccgaggtcaggagatcgagaccatcctggctaacacggtgaaaccccgtctctactaaaaatacaaaaaattagctgggcatggtggcgggcgcctgtagtcccagctactcaggaggctgagacaggagaatggagtgaacctgggaggtggagcttgcagtgagctgagatcacgccactgcactctagcctgggtgacagagtgagactctgtctcaaaaaaaaaaaaaaggccttgacctcccaaagtgctgggattacaggcgtgagccactgcacccagcctaaaaaaaaaaaaaaaaaatcttaagtaaaatatttgtatattgagtacagcagttaattcattcactgaatattttattgagggcctactatatatgctactatatatgtataatactagggaaacagcagtgaacaaaacttcaagaacaaaatattgggaagtctatagcacaacttttatattaatgggggaaaataaaaataaacagtaatctctaaagaagccaaaagaaacatttgataaaatttaatatcattcctaaattttaaaatattctttataaagtaggcctagatggatatatcttggacgtcacatttatgcttaatgtatattctggaatttgtcagttgtacatgattacaaacacagctttagttgtcttcagcaaaacagaatgtattgactaccttccaggataagggatacacaggtagattcaaggcatcaagtgatctcaacagaacctggcatttctccagctctcagctgtactttctttcactttgattttgttttcaggctccatgaggtggcagtatgacttgctaggaacccaggtcttcatctctccaaactcaagttgagcaggaaaacaagagtagattttctcagttgtttttacagaagccacaggatttactctaattggtccaacttggatggtttcccattcctgaactaatcacttttggccaaaggaatggggttgtctaactggctaaacctgaatcacagggtttcagagtaaagaaagaaggaaatgttattggaagaaaaagcaatgtttgctagttttaaataacaattaaagcaaagttctggccagcacggtggctcatgcctgtaatcccagcactttgggaggccaaggagggtacatcacttgaggtcaggagctcgagaccagtctggccaacatggtgaaattccgtctctactaaaaatacaaaaattagcttgatgtggtggtggacgcctgtaatcccagctactcgggaggctgaggcaggagaattgaggaggcggaggttccagtgagctgagatcacgccactgcactccaacctggactacagagcaagactctgtctcaaaaaaaaaaaaaaaagaaaaataattataataaagcaaagtctgattaaaaatggcaaataaataaccaggaataaagtgattaagaaatatgaaggacttattaaaactctattgagcaacataaaaaggatttaaatttaaaaaacaatatarttttttcctggaaaagactcaatatgaaacgatatatattttttccaaatctataaatttaatgtgatcccaaacacaatagcaacaggtttttctgcccaaacttgtcaaaatgtttagaaagttcatctggaaaaataaacataaaactacccaagtgacatcctttaaaattaagagtaataggtaggaaaactagacctcccgatattaaaacattttaaagttatggtaacttaaagagaatggtagcattatagaaatagatgctgagatgagtgaagcagaacacaatcaagaagcatataaatgtttaatattttaatggttatttaatttatataacagtttacatatttattttttcaacaagcatctaatgtagaccctgctatctgctaggtactatactatggcttgtcaagggcaattaagacagtctgtatctgcagtctaatttggagatgaagaacatggacttttgagtcagacagacctaggattgagaatgatgttacctatttgtgaaatgttctagaggcatagaatgtagcaaatactcagtaaatgttatttattattaccaaaagtggttaagagctttaatagacagcgtgaacaaagtataatgggaacacaggggaaggagcaactgggagtggtatgaacagatctagtgatttaccaatgttagaggaaactgatattacttcctctaaccaagttaatctgtctataccagctctgtccaatagacagtgcaatgatggaaatgctccctacctgtgttgccctatgtgggagccactagccacatgtggttatcgagcaattgaaatagagctaatgtgaccgaaaaactgaattttaaattttatttaattttaacttacttttttagagatggggtcttgctatgttggccaggctggagtgcagtggctattcacaggagctatcatatcatactatagcctcaaactcctgggctcaagcaattctcccacctcagcctcccaagtagctggagctgttggcacattgggaccactgcaccctactgattaatttaaataaccatggccgggcgtggtggctcacatctgtaatcccagcactttgggaggccaaggcgagtggatcacctgaggtcaggatttcgagaccagcctgactaacatggagaaaccccgtctctactaaaaatacaaaattagctgggcatggtggcgcatacctgtaatcccagctactcgggaggctgaggcaggagaattccttgaacctgggaggcggaggttgtggtgagccgagattgtgccattgcactccagcctggacaacaagagtgaaactccatctcaaaaaaaaaaaaaaagaaaaatgtaaccacatgtagttagtagctactgtacttgacaatgcagatctacataagagtaatatacaagccaaagaatgatataatagtttatattattatctgggaactatcctgatagttaatatgttattcgtttcaccctactccattctccctcaaagtttctaaattcacttgattgttttgtaatcctgttatggctatgtcagatgaggacacatccatctcagggtctgcatttgggggcctatactgctgcagagaccagataggttgcagtgatacaagcaggtaattgctggctggaagaaatagtctctggcagctagtgcttaaataaaaattggagttgctcaaaacaatcaaaatgttggattgtctattggcctcagtttccttcttctatatacctccacaggctgtctttgctctttgtcttttctcttttaaattcacccttggttttcagttacataaaaatgctaacagtagggacaggcatggcagctcatgcctgtaatcccagtactttgggaggctgaggtgggaggatcacttgaggccaggagtttgagatgagcctgagcaatatagtgagaccccatcttaacaacaaaaaaaatttttttttaaattacccaggtgtggtggcatgcacctgtgatcccagctacttgagaggctgaagcagaaggattgcttgaccccaggaatttgaggctgcagtgagttgtgattacatcaccccactctagcctgggcaacagagagagaccctcttatttaaagaaaaaaaaagctgggcatggtggctcatgcctgtaatcccagcactctgggaggccgaggtgggtggatcacctgaggtcaggagttcgagaccagcctggccaacatggtgaaaccccgtctctactaaacatacaacaaaattagctgagtgtggtggcgggtgcctgtaatcccagctactcgggaggctgaggtaggagaatcgcttgaaccagagaggcagaggttgcagggagctgagaatgcaccattgcactccagcctgggcgacaagrgtgaaactctgtctcaaaaaaaaaaaaaaaaattggccgggcacagtggctcacgcctgtaatcctagcactttgggaggccgaggcgggtggatcacgaggtcaggagttcgaggccagccatttggagaccatcctggccaacatggtgaaatgccatctctactaaaaatgtgagaaaaaaaaattagctgggcgtggtggcaggcgcctgtagtcccagctactcgggaggctgaggcaggagaatggtgtgaacccaggaggcgaagcttacagtgagcccagatggtgccactgcactccagcctgggcgatggagcaagcctccatctcaaaaaaataaaaaataaaaaataaataaaaattagccaggggtattagcgggcacctgtaatcccagctactcagaaggctgaggcaggagaatggcttgagcccaggaagtggaggttgcagtgagccaagattgcaccactgctctccagcctggaccacagagcaagactctctcagaaaaaataaaaaataaaaataaagaagacaaaaccacaagacasgatttaccaccctgtgctatgttaatgaggaaaaaaaggacaaaaccttgaggtcagcttttttaatatagccatttaaaaaataattttgaatacgaaaagaggtaaacgtagtcacagattaaggcaaagacaggactgagaatcaagttgggagtccacgtcccaggctgttctagaacatatagtctctctcttctttgggatttgtattctagattggaggaggcacgtgtagccattgccatctgtcacttattttctcaggctgtcaagctatgtctgatttagttaagtaaaaagaaaatttaagttcatttttttttttcacctgagatgtaggaggaacttctaaaatactggcctgagaaaacctaatctctctttggttatttcagtagctcaacttaagtggagggcaacttgagtggagggttcaatgataggaaatacaatctcttcagtatcattcagtgttgcttaaaaggcttacacatgtgtccatctactgagggtacatgtctgcctcagaagtcagctcgccaattctacccaataggtgaagcggtagacataggtgaagcggtagacataggtgaagtggtagacataggtgaagcggtaggtttagggtcaagagacctgttagtattgctcctctggctgctctctgtctttttctatctaggatcacacgcatagacagaacttaagtaatttttccttagagtagtattaaagttttaactcatttgctaacctattggctaaactgtttaaactatggcctaaaactttaataaacaaataatatcaaacagaaaaaacaggccgggtgcggtggctcacgcctataatcccagcactttgggaggccaaggtgggtggatcacctgaggtcaggagttcaagaccagcctggccaacatggtgaaaccctgtctctactaaaaatacaaaaaattagccaggcatgatggcgggcacctgtaatcccagccacttgggaggctgaggcaggagaatcacttgaacccaggaggcggaggttgcagtgagccaagatcacgccattgcactccagcctgggcaacaaaagcgaaactccgtcttaattaaaaaaaaaaaaagtatatatatacacacacacacacacaattcagttacaaatgatgatcatttataggagaaaaaagggaattggatgtaaaggaagaagtcagggagaaagaggacaaagacaaatggtaagcaacgtaaacccttcttatttctgtagtttgtgggctgttttcgtaggccttccatattccaataaacactgtatttatccagctaattggactacggaagcagtgttaatcactgcttatttttctaagcataggaggcttggctctcctggtgataaccataccagacaaccaaaaagaaaccggtgctgggaactagggagcagtgtggtgagagcatttctccagctggaagaaatcaagccaggaataggtccagccctggccaaaggttttctcctcatgacataagaatatttagtggcagctgcaggctgatgattttccactagataggttgtgattttctctcttcagaagcagcatttcatttttcttgagaaggatgaatttcttctatgaaggaggaacttgactaaggtgacctacttctgtctttaccaagcagagaagtgaaaagcagttttacaaggctcttcattgggggtttctgtgtttctttcacagagattgagacagtgaaattggcccgttctgtcttcagcaaactacacgagatttgctgcagctgggtgaaagacttccccctccgcaggagaccccagctttattatgagacatcaatccatgccatcaaaaacatgcgcaggaaaatggaggacaaacatgtctgcattcctgactttaatatgctcttcaacctagaggtaaagggcactttcggagagtcagtgagattttaaagacaaaacaaacaccttcatggtcctgttagaaaaggaaaacttctgttatatttctaattgtatctctggtagantagagtagggctaagtgcaaagtggcacaaatttgcaacagaaaaggaactattttacgttcttttgaataggtaatgcattcacatggttcaaaattgggaaaataaaaatgtctcttatccttgcctcccaggtactcagttcccttccatggaggcaaggtagtcttttgtgtcaccttccagagctattctataaacatataagcaaaaaagaaaatgattaggctgggtgtggtagctcacgcctgtaatcctagcactttgggaggctgatacgggaggattgcttgagaccaggagtttgagaccagcctgggtgacagacatagtgagactgtctcttaaaaaaaaaaaagaaagaaaagaaaaaacaattaaaaaaaattatatctcaataaagcagttttgtaaaaaaaaaaaaaaaaaaaaaacccaaactatttctatagtataatcaaatggtgtattaagttctcacattactatgttgctgaagcaacacaaacacaaaaggaagatttaagactgacgcagtttatttcatgtgattttctttttaaaatcttggtctctgagataggaaagtagctggaattatatttcataaatctctgtatctgacaaattggatctatatgagccttggcagcttaataactattttcttgttatctttcttttctttttctattaaatgtattatgttaatgcaaacaagtaggtttgttttctttgcctgtcacttgcctcttttcttcactcaagtccataacttaaaaattacaatgtagtaatttatacaaagcacaatatttcctctgtttagcagctaaatttacattttagctgtcaaggtctaatcagcaatgatggcaggttggtaattggtgtttatgttataaagatagatcagctgatgtctttgtttctagtaccatggccatgcaaatgtaacccagaaggattgtgtgataaacaatccttatatcactatacctacttgaagattatactcatatttggggcattgttgttgttcgttgacttccttggtttctgttttgcctcctaatttcaaaattagcccaaaggacttaactcagaaaggagaaccttgctatagtgaaatagattttaagagcaatatggcaacacatatgtagaacctaataaattttcacactctttgatctggtcatttcacttttaattctttattataagaaaatagaaatgcagaaaagtcttaggcatgtgttttgtttgacataaatgtttttacaacattgtttataataaattgaaaattatctaaatcatgaaagggaatgataactatgatatgctcatataagatgcatattttaagccatttaaaacaatgtctttaaataaatcttagtgcgatgaggaaatgccaataataaaaatgacgaaaagtaggctataaaatgtcatgcacattctgatcctaatttcatttatatatatgtgtatatatatatatatagagagagagagagagagagagggagggaggactggttatctgtgtatggtggaattattagtgatatttcctttgttattagtctaaattatcatacattattataatagggaaaacatcagtgaatgttttgtgtttttttaaaaagaagctatcctttttttatttttttaagaaatccacttagcttccttttgtttcttgtggtgctatttcgagttgtttaaaaatgagtactgctttagtagggatagaaattctacctgtcagcattctttctttctttttttttttttttgaaatggagtctcgctcgctctgtctccaggctggagtgaagtggcgcgatctcgactcactgcaacctccgcttcccgggttcaagagattcttctgcctcagcctcccgagtagctgggagtacaggcgcgtgccaccacacccagctaatttttgtatttttagtagagacagggtttcaccatgttggccaggatggtcttgatctcttgaccttgtgatctgcccgccttggcctctcaaagtgctggaattacaggtgtgagccaccgcacccggccaggattatttctagagagttgtttaatccgtccttcatgtcattaaagttgctgaaagaactagttgtaatgtgtgtgttagacaaaggtttcataacattttggttattattctatggacatttatatttgatacttttgtgaatgtaatatacccttttaaaagtaactttttcagccaggtgcagtggctcttgcctgtaatcccagctacttgggaggctgaggcgggatgatcctttgagcccaggaattcgaagttacaatgatctgtgatcatgccactgtaccctagcctgggtgtcaaagtgagacgctgactccaaaaataaataaataaaaagaactttttcaaagtacagatatacttgttattttagtagcccttccaaatccccatgagacagcaactcgtccctgcctaacagatgagaaaactacatgatttgcttaagaatcaatgacaggcctggactcctctaaggctcttagaacagaaaaagaagtcaaaagacttgcaaatgaaaattattacatactgttgcctgaagggagctcaggactcagtgcgagttcagtgcgtcacagatctcctaagtgagacagatctgagatttamacacttgagcagatgataaagcagcaaactgcttaatggttgatgtggaatcttatgattaggcttttgtcaagacaaagcacagggttggaagatcctcctctggcagtttactttgcaaggaaatgtgaaactaaaatcttagatcacggggtgaggcaaagtggtcagccgcacagggcatttgagcatctgatgtggttcaagtttggtaaactagtttagagatgctgtgctatttgtggtgagaatgcagtgtgactgggaatgatttatgaagaaggtattatagtttagaagtatgtttatgctttcatatctttatatattttaaacttgatttaattggccttgtgttggaagaccagttattttctattgttctcaggttctaattttgctattaaagtactttcattttgaaaaaaatcactcaatctggagctgcttttgttcaattccttctcataccctccctatcccccctcccccaacttgtaacagcaattttgaagcaaatgtacgtgggtggtttccatggtacaagacaacaactttcacagagagagggcacttcagcttgagctaattgggcatgacatgttccagtgttctggtgtgtaaacacagataccctaatattgcaggtatttcagcagttgatcaggcatgttagagaaggaaaacatttagtctcattattctgaatgacaaatgcagtggaggagaaaggatgggcaacaatgatgccaggagattggttcatttgaatcatgctatacccaactcccataactgttctgtgtttctgttgacaggaccaggaagaacaagcttactttgcagtgtttgatggccatgggggagtagatgctgctatttatgcctccattcacctccacgttaacttagtccgccaggagatgttcccccatgatcctgctgaggccctgtgcagggccttccgggtcactgatgagcggtttgtgcagaaagcagccagggaggtatgcccctttctcataagttccagctagaaatgtactagctgagctcaatttggtctgtgtggttaaagggctatttagattttctctttctgggcagacattatccaaactgtattcttgactcacagtattggattctgttgtagttccaattccctcctcaggaagagtttcagggggtacaatgaggtactgtatagaaaatctcaagctgtaattttctggattcatttctgtaataactgctggatttggcaggtgagtttcatctttcttttattcaccattgcctgtcaggttcacaccaggaccatctctctaagcagactcttgctgacaagatctggatatggtgaataaaacaatggtctaaaaaagaaacagaaactgggattacttccatacatttggttctaaatgggtaggcagtgttttgctgtgtatctcttgagggaaaattcgcttggagagggtgaatccttaaatgatccttgagctgatttttctcttaatagggagaaaagaagagctcatgtcctacattgcgaaggttaatcagacctaagttttttttactttgaataaatggcaagggctctatattaaggtctaaaagtaaaaaaattaatctaattatcgttctgggtattggtacataattaactacagtgttctatattggatttttaactggggacgaataaaagaatttttaatttttaaaaataattacagaagtagatacagacaaaaaataagactcctgccctgtgacttaaacattaactcttttyaaaatgggcttggagagatcagggtaatcatttaatccattttttgatagcatagttatgctacaagcaataatggggcttagaattaatgaaacaataactcagacctatttggtattaagaaagagaattattcttcatctctcccctcccctaagtttggattaatatgcaaatccaacagtaaccagtagagtccacacaaagaggtgggtctggagaataaagccactcttgacctcagagctccagtctcttgaggacctgcattctgcttggctctgcctctcttgaagctgtgggcttttatcatctgagtcgaggacaagggccggcccctgagaggtgacccgtaatcatcaatgtgaaacaaagagattcactctgtcttcttcatcctctattctattctttttttcctctgtcttctcaaaattatgtgttgttgttgttgttgttgttttctgaccatgtttacctcatttgttttgtcagtgaccctggtgtctctcagttctgccaatagttctgaataatttaggtttgtctcagcgccccttttctccttcttatgcttccatgtgctgctaactgctgggaagaaaacagctattcctgttatgaagcagccctgcctcctgttctctccagggcatatgcactgaagtgtgtttatcatgtgttctagggggctgagtttttgaacattctgtgtgggaagacattttattggtgggtgaggatttataacaaactttccctatatagggaaaatgagaagttgtttttctcattggatacaagagaccttttaccacccctgacgcattggttctaatttaggccaggtccttagtaacagaaagtcatgctcatttggtggtgactcatgtcaaatggggatgtcattttcgtatagtaggaccaagagctttaagtacagtcgtagctactgcagtgaaattccaggctgttagttctttatgcaatgttccaaaagcaaagacccctaaaaatactgtaggaaggatatttttttaaaggtataagcatcttagtactccagggaacgtaagctgtctcttggccccttagcttaatttccagagattagagcatctgttgtgtaccaatcagatgttttatatatcattttatacagctaggactctcccactgaacaaatacgatgtcagtaatgaaatggagagcagaatatagaaatttttactctgaggattggtatagaggatttagtgcttgactgggaggaaaaagaatttcaattctgtcttatatactaatagttacctgcccttgggcaagtcacataacctgccatagttttcttatctatatttaaagtggaattaataatcatcctcgccctgcatatcacagatcaggtggacttatgtgtgtatatacacataaatacatacatgcatatacaaatgcattgagacaatgaattattatatatgtgtgaaattccaytattaatagtatagctcccagctgaaaagcttaattataaattgcttctcaataagaatgtagtatctatttcttttcactgagtctagttttatttaaactgttttcagagcttaagatgtgggaccacaggagtggtgactttcatcagaggcaacatgctacatgtggcctgggtgggtgattcccaggttatgcttgtgagaaagggccaagctgttgaactaatgaagccacacaaaccagacagagaggtaagtatggtctgttttaatagagcccatgctctagttattagtttagattttctagttattgattaggattcacttactttttttttttttgagatggagtttcactctgttgcccaggctggagtgcaatggtgtgatcttggctcactgcaacctccgcctcctgggttcaagcgattctcctgcctcagcctcccgagtagctgggattacaggcatgtgccaccacgcccagctaatttttgtatttttagtagagacggggtttcaccatgttggccaggctggtcttgaactcctgacttcaggtgatctgcctgcttcggcctcccaaagtactgggattataggcgtgagccaccgcgcccggccaggattcacttaattattacaattattgctatcacatcagcaactgtgcccaccctccaatggagaaacaaagagaaccttttcatgagctgatgagtattatatctgttgtttactgttaaagtaaatgaataaatcctgaatccagttatttgcttctttttattgcattgctgtttaggatgaaaagcagagaattgaggcccttggaggttgcgtagtctggtttggtgcctggagggtgaatggaagtctgtcggtttccagagctattggtaggaaaaacaaatttttgtttctccaaactgtcctcttctagctcattctcctgtatcaactctgatacagggaacctgagatgataatttatgttaccagaatgcttattattctttaaaataataattggataacgtctcttttaattgtttgatttagttaaacctgtacatttatatacttaaattccattattgaaagagaactgccaggctcagtggctcatgcctgtaatcccaacactttgggaggccgaggcgggtgtatcacgaggtcaggagttcaagaccagcctggccaacatagtgaaaccccatctctattaaaaatacaaaaaattagccaggcgtggtggcgggcgcctgtaatcccagctacttgggaggctgaggcaggaatattgcttgaacctgggaagcagaggttgcagctagtggagatcgcgccattgcacgccagcctgggtgacagtgtgagactgtctcaaaaaaaaaaaaaagagaaccatatcaagaaatgcagaattttctagtttctatacatttaaaattttatggaagcctttaatcagtacccaaatctgcttcaaaccacagtggttgggacaggcacagtggctcacgcctgtaatcccagcactttgggaggctgaagagggtttgagcccaggagttaaagaccagcctgggcaacatagtaagacttcatctcttaaaaaaacaaaaaacaaaaaaaacaaaggccgggcgcagtgggtcacgcctgtattcccagcactttgggaggctgaggtgggcagatcatgaggtcaggagatggagaccatcctggctaacacgatgaatccccgtctctactaaaaatataaaaaattagctgggtgttgtggcacacgtctgtagtcccagctacttgggaggttgaggcaggagaatcacttgaatctgggaggcggaggttgcagtgagtcgagatcgcgccactgcgctccaggctgggcgacagagcgagactccatctcaaaaaaaaaaaaaaaaaaaaaaaaaaattgctgggcgtagtggcttgtgcctgtagtcctagtacacaggaggctgaggcggaaggattgcttgagtccaggagtttgaggctgcagtgagccaagattgtgccactgcactccagcctgggccaagggagtgagatcctgtcttaaaacaaaaacaaaaaatcatagtgtttctcatttcattgcattttgggtcaaatcagtatttttcagagaatggaagcctttctccgtattttatccacattcattttgtttatgcctctaaattatttccatgaattttaaaatgacataaataacagaataagttgataggaaaagcattgtgctttttatatgaaaactactttctgtatgtggaatacagtcacctgtcagataaccctggagtttcaaagaaccctatatccctgggacttaaatttttcaaaagaagggaaagtcaatgaaactcggtctaaaacgtagagattaaacagctaagttggctggacaaaatacaagggtataagttcaaagaattaagctatttctgtctttgtctcactttgggccctgggtttattattttaggcttcatggcttagcttcacttcctgtttttttaaaaaagaataaatcaatatgtatatctatatgggtgatatgtacattacatgtatactgcagtttttaatctctgcttccctaaagaaatgaagtaattagacatggttggaattcacatctagtctcaaaatttagttaaaaattaccaaaaattccagaacatgaagaaaatctgaaaggatttagctttcaccactgatttgagttcctcccactctttgggaaggtgctagcaagctgtgaagtggcccaaatatgagtagaaagctgaaagagaaatagctaaaagagtctacaaatacctcctgaaaaattgagatttggcttgaccttagactggagggaattattaggaactctagaataaggccaaaaaggggaaatgtctcatttctaaaatatacccttatatggaattattattattattattggtggggaaaagtctttatcatgcacattgtaggtttagcaggacccactacccatcaaatgctacccttgactgaaaatcaccgaaccagaggactatactatctgtggaaccaatttacgttaatgatcattatatgagtgcttgagtggccagtgaattaggtttacaactcaaaccaaacacctatttctcctgatctgacctttgtcagaggattgaggatcatctttaatacttgttacagaactaacttaatagagaataccagcttcttcttctaaaagggaaaaccaaagcagggaagaatgtcccttaataagtgacaatctcagagaaaaggctgggtatggcagccagcactgtggaaggccaaggagggaggaatgcctgagcccaggattttgagaccaacctgggcaacatagtgatacctcatctctattttaataataaaaaataaacaatctaagagtggataagggagacttcatacatagagtgacttttgagttgaatgtggaggataatgtgctgggaaggaaatccctacacaggtagagggaaatataaatacacaggggtttgaaaaggcatggcatgttttaggaaaagcaacaagtccaggaggttagagcagagatgggagtggtagattagcagtgttggtgccagattgcaaagggccttatgtgcgaggctaagtagtctggactttaccaggtgaatacgcagaggggccacagggtcagctttgtatttataaagatatttgtatggaagctgggctagagtagaaagagcctggctgggagacattcatacagtttgttacagagatgaggagagctaaaaaggaatatggaggagggtatcaactgatgagatggattggttggtgggaaaacctactaatcaacaaacaatctggcactggaaataggcagtaacataaaggagcaagtgtagatttagtttcttgggcagtttgatggtgaaggggagaaaggaaatagtgtggtggcttaaggcaaaagctgattcaggaaagggttcctttttattgtttctatttttaggacgaggagattttagatttgagcatgtttgtaggacaaggaagagagcaagtagaggagaaattgaagacgagagagtagagaagccagagcagcacaggctcactgttaggatgggaaaaggacactgcttaccctgagaaaatggtagctgatatgggagaatctctacagattaaacagtgcatgtgtggcaagggtgggaggggaattgagaaaattcaagcctgatcaacttgtctttgaagtaggaaattaggccatttaccaaaatccagtagcttaagtggatgagggagttgaagaatttgagaaagaattggaaaccacatggaataaaatggggggctgcaaaaggacaagaaaaaggactcctgggcagagttcagctctactcaggaaagaaatgatacttataaaaatgaaaaggttttcaacagtttctccccatgagcccttcagatttatgatccaaagttgacagaggcatgatatgtttcctaacatatggagagaagaggttgaagacaaaaggatgttgccatttctacgatgaaatggatattcatgccctcctaccaaatttgggggcgaaatgtcatgaatttgacacccaacagtagagcaggtgaaaagccagaactttggcagcattttctctgtacaaatctttgtatgttctgttccaaactaacagttgcagcagtcttttaattgaagcactaaaacaagatttttgggaacagtgtgactcagatcacatttatttttagaggyggaattcaaaaaataataatgatgataatcatatagtcaggtagaataggggatgggaactttagtaaattggtgaaggacactgaatcccatattggattttatttattatttatttttaaatatcttttaaatttttgcattttctgcttaaatagattgagttttaatgagctctaacaggctatggaggcaccttagcatataagtgaagttgattaaatcaaaagcatgcttgggaaagatggttttgactcctgtaagaaataatgaatgagggctgggcgcggtggctcacacctagaatcccagcactttgagaagcccaggtgggtagatcacaaggtcaggagttcaagaccagcctgaccaacatggtgaaaccctgtctctactaaaaacacaaaaattagctgggtattgtggtgcgtgcctgtaatcccagctacttgggaggctgaggcaggagaattgcttgaatccgggaggtggaggttgcaatgagctgagatcacaccactgcactccagtctgggccacagtgagactctgtctcaaaaaaaaaaaaaaaagaaataatgaatgaatgaatggagaagagcctagatatgagtaagatgagaggttgtgtttgtgaatggaaggagtgaaatgaacatttataatgtcgaagactaatttcttacctaatagatatactaactcaggtaattatattaattatttgttgctctgtgtatctaatcatgcaacctgctagatagggcatgtgcccacattggttctagcagagttatccatagggttcctaatgagctttctagcctatttgaggattaaacagggatgttaaatgttggaaagaaacttttttttgagacagagtctccctctgtcatccaggctggagtgcagtggcgcaatctgggctcactgcaacctctgcctcctgggttcaaacaattctcctgcctcagcctcttgagtagctgggactttgcatgcatgccaccaggcccggctaatttttgtatttttagtagagacaaggtttcaccatgatggccaggctggcttcgtactcccgacctcaagtatcctcccgccttggcctcccaaagtgctgggattacaggcatgcgcctggccaactttcttgtgtcaaagagaacctataacagatactagaaataatgaatatatagtcagattactcaagtgagtttatcttcattttaatattccctgagtcaaaaagttcggttttagtgcaatggaaaggatagtaattgatgagagttgtgtaggtgacaagtagaagagctaggatttggacccaggcagtctgacactagtgctggtgtccttaaccactaagcaatatgccactgctatacagtaaagccctttgtaaatatctggagtttatttcttgtttttataatactatgtaatgatgatttatgataccctactctaggaattattgctcagtaccctgtgtgtggttttgtttttatttttttgtaaagaagtgaatgagaggccagatgcggtggctcatgcctgttatcccagcactttgggaggccgacacaggcagattatcagaggtcaggagttcgacgccagcctggccaatatggtgaaaccccgtctctaataaaaatataaaaattagccaggtgtggtggcgtacgcctgtaatcccagctactccggaggcggaggcaggagaattgctggaacctgggaggcagaggctgcagtgacccgagattgtgccactgcactccagcctgggcgacaaaaaataaaaataaaaataaaaaagtgaattgagagtcccttgttgtagtcataagctatttggttacctcataggctaaggacccttttgctgcactctcacaaggtacctaaaggaatgtaatcaatgtaaacaatgaatggatttggaagtgctctggatctgaaagccctaaatgatcaattatctcagtagtctggtgatagaaacctagtttagtgtggtcccaaggtctgcagtctcgctcctaccccaagcaccctactctccaactgtacattactccctaacagttgcctctgcctttgcttatcctgttccctcaattgaggcaacttctctgcctggtgataactaacttacccttcaggaccagctcagatgtcattctgtgagaggacgaagctaagcaagaaaaggaagagagaaaggcccagaaagaccttgggttctcacagttgttaatgagtggggaaatgcacaataacaataaagacagaagtggggcgatgagcagagccatatgaagaatatggcagtctctaaatataagagaaaaatggccatacattttgtctgttctctagaagttacaggtaaagcaccactaaaaaatagaaagccaagtgggttgggaatcaagaaaactgcattcagctcccatgtgtgaggccttgggtcagccacataactcctcctggcttaagggagttagacttgatttataaaatctcgtgtaactcaaaccttccttcgtgctcgcagcatgaagctatttattgatttctaaacaagaatagaacaaaaattatttaatgaagagaatgatcagagctttggtttgcttctttcaatgtggacttgttttcaaatttcaattaaatcaaaaccacctgcaaaagaacagatctactgaatcaaccatgtcttcctacacagtgtactgaatttttcagtacagcaacaaacttttagatctgacattgttgttacactcagctaagcctaaatcatagccagaggtgcagattcagagtctaagctaggtaaggacttatgcccagtaactagcaattatttaactgggagtaaggagtaagcagatctgattaccagagaatttaagtattttgtcaaaaactrttttataaattctttccagtcaagtcagttcacaatccagtaagctgtgatcagagtcatggcattggtcataaacgttcttagcatgcaaggtaaaacaaatgctaatgatgcccctacactctgcttcccgcaggagatgctgaacataagccatatatctgtggggatgcagattctgcctccactgttctggatgggaccgaagactacctcattctggcctgtgatggcttctatgacaccgtgaaccctgatgaggcagtgaaagttgtgtccgaccacctgaaagagaataatggagacagcagcatggttgcccacaaattagtggcatcagctcgtgatgctgggtcaagtgataacatcacggttattgtggtattcctgagggacatgaacaaagctgtaaatgttagtgaggaatcagattggacagagaactcttttcaaggagggcaagaagatggtggggatgataaggagaatcatggagagtgcaaacgcccttggcctcagcaccagtgctcagcaccagccgacctaggctatgatgggcgtgtggattcattcactgatagaactagcctgagcccagggtcccaaatcaacgtgctggaagacccaggctacctagatctcacacaaatagaagcaagcaaacctcacagtgcccagtttttgctaccagttgagatgtttggtcctggtgcaccaaagaaagcaaatyttattaatgagttaatgatggagaaaaaatcagttcagtcatcattgcctgaatggagtggtgctggagagtttcccactgctttcaatttgggttcaacaggggagcagatatacagaatgcagagcttgtctcctgtctgttcagggttggaaaatgaacagttcaaatccccrggaaacagagtttytagattgtctcatttacgccaccactactcaaagaagtggcacagattcaggtttaatccaaagttttattcatttctctctgctcaagagccttcccacaaaataggcactagcctgtcctcacttactggaagtgggaagagaaataggataagaagttctctgccatggaggcaaaatagttggaaagggtacagtgaaaacatgaggaagctcagaaagactcatgatattccatgcccagatcttccttggagctataaaatagaataatttttctttcaagtaggttagctagctctcccccaataaaaataccactatcagagtagaaacaaggtagacatttctaaaacatatgtgcttcattatgaatccatggatggctcaattcttaaatgtaaatagatctctaggaaactcaaagtacagtgttttcaatctaaaaagaagtattggcagtttcacttgcaaaattacacagctggtccctgtgatgtgtctcgacaccaatacacaacccccttcccaccatccttcatgtcactagatacacaacccccttcccaccatcccttcagtcactagtggaagctttcaagttagttatttcagtcaggatatacagtgttgaaatctcaatgcagttgaaatctggtctgatgtgcctaatttatctgtggaaaatttaatgctgaattacatttggttgggaaatgtccctcaaaatcctgggcactatgaaggaaccccctgccccctcacctttttgggtaggtaaaagactaaaagccatatggattttaactgataacaatgaaagtggtaaatcagtgtaaaagtgtcatattctcagacttgtgaggcggtttatagtcagaaagatttacggatttttttcctgtaacataaaagattgtgaactttttttaattaaaaaatatttcctagggctgtagttatttgggagtttcataacctgttatggtgcttttggtggaatttttattatttagcattttaggagaccgctgtcaactggttttaatctatgatgctaatgtgttttccactgtaccctcatctcaggaataaaactgctttaacggagatgatgtcaggtacaaatacactatagagtcaaaataccatttacaaagaaaatcaaaagcatttctatattttgtctttttttagttcagacagcaaaggcatgtactactataaaatacaaagtgattttagagaatgaaaaatgctacttttatcttctctaaaattatttcccccaaggtagtgaagtaattggaatgaaggaggctgaaagtattgtctaaagtgagcccagaggccactgagaatgcagattactgacagccaggtctgtttagttgtaattggaagacacatgagtgtcctgcttacatgtagcttcagactgcagagacaggacgtgtgcttttcatttcaatatttagttatatttgatattttgaaactgtctgctttttgctatttctgcagtttcaagttagttagaagcatgttgtcaactaaagacaacaaactatcagattcattcattcagtgaagcagcctctgattctctaagagtcacgaatgtcttagtgttaccctcccctagtcaacagcagaccagcctggccaatgcctatgggtggcccctctggagtgctcactaacaagggtgagtgctctcgctaagaagtgtcccccgcctaatcatgtgtttataggatagtacacgttccccaggcccataacagaggactaaaatctctgaattttaaagacacagatgactggcatattttggataccagtatagctatatcaaatagacaaaaacagcttcactttagcaatgatcagattgttaatctacagattttattttttaaaatttggatgtaagtagagactttcagtatttgttttctcttgattttgaagtcatttcttcttctcacgtctgtgacaaatggttgaaaaggagtcaacatggccccaactatagtgccggaaccttttcatcattctgaggctttgccccacacatggtcctcactcatatctgtcaccttctgaagcctagatcttgttaacccatcaggtgcagtgtcagtttcaaatcaaattatctaagaaaacaagaaaacaaaggcagcagactattggtacacattatagtccaaagtgcttagcgaagtaaaaaaaaaagctttttaaaatttctattgttgtctattggtaatgtttttgatcagaataaagagggtaaagggaaaaagttactacacatgctaggctttctcagtggggaaaaaaatggctggatagaactgggacaaacacagacccatctttaggggtctggattttgtaggtccgactacacagcagtgttaactcatttctcatgccattagctctctacaaaataaagcaaagtagttctagtgtggtcgttataaaccaatattgtgaaaaatagcaactattcatttgttcacaacatgcgtatttatagagtagttaggtaccatttgtaaggtaaatcctttaaaattctataatacatactaaaatagtggttattggtctgatatatgctgctcttggttctataaactagataaaagcagtgctttgtgaaatgcagtgttctctcttaacgccactggtgataggaagtagttcccttcagttcaaatcctgtgcccttatttgctgcttgctgacgtaagcaataagtaaccctctaactaatggtatctacatatttctgtaacttgtatttaatgatggtgtacctggtgattgtaaaaatattagacagatataaaagtatctatataatatctataaactgttaatgctgaggtatagtctgtgaattatgtgttttgtatttttattcattgtgtaatttagtggtggtgaaagttctacactcaatccttaaagagtggcagtatccctttttcaatttaacatggtctgcatcaatctgtttgcctgctaaacaagttagaataggaaatagtaaaataaatccaaacaagagtgtaatattggttagggaaacaaacttcargtcaccaactgaagtcattacaaactccttgtacattcactgtgagtttcaaagggagtcagtccctaatttacaggtttcctttgttcactttctagatgtgtacttttgagggacatgaggttaggcaacattacagcaacacacactggggctattaatcccatttaggtctgtactaaagaggatgggtagaaacacatatgtatataccttttctttacctagaagtgccatccattgtccttgaattattatgattaaagttactgttgcatttaggaggctccttgaaagtaacaccttttccaaggacaatggcaacaatgtcaatgtcaacactgagtctaattttgaccacatttatagtggtatagtgtcaatactgcattttcatgacaaccacactccactgttgaaacactgtgccagtgagaagtgcaacatccagtgggcagatgaaaatgatgcatggccaagttcagtgtttacagataaaactgctgtggttcaagtgcttccttccccatcaaatccttgataaggctttgtgggaaaatgatctaaattattgttttaatttttaaacctaatttattcactcagtgaacattcttacctaagcaaggctataaaagggaatactacagttttgtccacactttaatttgagaccatttttctttgaatcgtaagttagcaaaagaaatttttttcacctttgaaaatcacgtgatgtkaaaggacaaatgcccactcttctattctgatctgcaaatagcttaaatgtctcttgcaaaacaaagtaagataccaccagtattacaacacaatgattttccagacaaatggtatggtgttgaaaaataactgttacttcttaaagcagcatttkatcttctattttgaagactatttattgtaataattagaaaacatgaaatagggaactccagactgacacagcagttgtttttgaaaaggaaataaactttgatgaattagataatccagatacatcattgtaaactcttactctaggtgctctttggtgagagacaggctttgttctcttgttcataacatttctctgcaaagaattctctatggagtgaagcgaatgaagtgaataatttcttaccaaataaatttatcaatttacaaatctgctctacatctcacttttgagttcagttgtagtcatgagtgatccttcatattttattaaaagtgttcattcaggtaaggtgtatgttgaaattttgccaattatcttaataaaacctggcaatttaaaaaccactagtcatttgtctttttatttaaaggaaaggtaagttatttactgtttaaatttgtgcagatttcttcagaactggaaaataaaatcctgagatggacgttaagtttggaagcttggaacatttaaaaagaagatttgctaaatgctgctgtaacattattttaccccagaagagaggtatttagccttatacatgttctcttcattagctgaactgcgaggagagggagtggtgttataatcctaaaagaaaagaggaacccgacctgccaaggactaagcggtggtcatcaaatctcccaactacttcattcttagaactctgcatctaaccaagctttcccctttcgcttagcctctttgagtttcaagctagaagaaagtaaggaaatcatcagatgagctgtggtggaaagcctcccaaggactgctgataagtgagtaaaaggagacagagacaaaaaggacaatgtgggggagggaagtcacttacgacacctgcatctgaagggagggaactgaccttccaaacgagtcaaccttgtcaatacactgcactgttctcctgcctaccagtaaagaaggcctttacaattaattttacatagtttcaaaaatcttcaactcctaattccctaaattcattcagtccttggcatgactttatatagaaccaaatgaacaattgagaaaaaaaaggtgaagttttgaaagaaggacatatttgaaggggtttactgaagcagggaatgacagaaaaggaacattttgattagtaagtgttacacttgaaaaaattccctaaaatatagtattacttagatcaaaaggaacacctctttctgaaggagcagcacacagcaagacagaagggaaccactaggtacagtaaaatcatttgaacatcatagaaatttacccaagttaccaaattatcagaaacaactgtctgtactgacaagctgcataactgagcattccccccmacacccgccccctgttgctgtcagtgtgcatcatttcctttccttcttttgagatggagtttcattctgtcacccaggccggagtgcagtgacgtgatcttggctcaccacaacctctgcctcccaggttcaagcgattttcctgcctcaatctcccaagtagctgggattacaggcgcccgccaccacacccagctcattttattattattagtggaggtggggtttcaccatgttggccaggctggtctcgaactcctgacctcagatgatccaccctcccacctcggcctccctaagtgcatcattttctttttgattgcaagtttccatctgtctttttttttttttttttttcttttttgagacaagagtcctgctgtgtcaccctggctggagtgcagtggtgcaatctcggctcactgcaacctctgcctcccaggttcaagcaattcttgtgcctcagcctcccaggatgctgggattacaggcgtcggccaccacgcctggcttttgtgtttttagtagagacggggttttgccatgttggccagactggtcttgaacacctgacctcaagtgatctgcctgccttggcctccccaagtgctgggatttacaggtgtgagacaccacgcccggccccatctgtcatcttaacagcaattagtaaagaacactttttctattgtgctttagggaacctccttttgcttggcctaggaataaccttatggaagatcccttacttacatttaaaacaagtcacattcttttctgagagccccaactgttgaatatgtttagtaagaagcgctcttccctgggcagttggttgagcctgcctcttatgctgagctgtaggatgctgccccagtcacgcaacctccagatgaagtgtgtcctctcctcattgtgcaaacaagggccctcacacacaggttctatttgatttttataatcttgctttaggaccagggaaacaaatgtgaaaaactgtcaagaatgatacacatttggggaaaccattttccaaatgagtaactggagtttaactaaagatgatgaaaaagttgtccctgctagtcattacattgagtagtatgacagctacaggattaggggtggccaattaagccaaatcgagttgctacgggttcactaggtcaaatgaaacccagtgggaggtgagcctatgcagcagcctttcccaaatgcacaccaggagacactgactgacctgaaggtctcgggcaaggactctggcccgcagggtctgcagagcaggaatggaagggagactcccggtcaacatgccagccagagaaaaggattttagaaagagagcagcccgtactactgatgtcccaaactacactgtggctaatcttaccatttgctcttaagcatccctaagcagagttctaaaacttctataaatctagactatgaaggcatgtattggtagatgtgagaatgagaggtagaatgaggagaaatctaaaaatattaccacataaaaattcaaatgaatatgcaaaaaagaaaatagctcttggggttttctatttcccaaatttttctaatcttatcacctttataattcaaacatttaaaaaactagataaaaaaattaaaaatggctcattttctgaattctggttttaggattaattacactcatgttttacattcaataaaatgtgtgttttacatatatacatttttaaatcacagcacttccagcttccactccgggatgtaggggtagaaggagcatttcttctactcttacaatgcaaacgagccagatgaactataaattaggacattttttcgaatccattggaaagctgaggttgcagagtaaccaaatggcaccaaatggagaggggcagttgcctgcaaggggagagaagacattagcactagtttcgtagggtcgttgtaaacagacactggaaagaataggctagctaaaagtgatgattggtgaaggcagaatatgggctgcaggagtgttaagacccgggggcctgcagaaactaggggagtcgccctatcttgcaggctttttctttacaatctctaccaggggctcagaaaatactgtaaagagccctaagaagtgtcggctgtgacacacacccaggggagtatacagcggccttgggcatgggtaaaggaacttaccataccctttctctcatctcacagaacaaaagcaccctatgagggaaaaggagcacaaatactgttgccgtctggacactggtgaaaagtcactgcagcagagagaagggactatggaagaaaagccccatcccagaggagggggcagaaatatcactgggcccacaattagctgggaaggggcaagtaaacagagaccctccccaacctagggacacagtgcctaaaactgcaacctaatccaagaacgccagcccctccccagcccccgttacacttcaagaaacagcagagtatttccaggaggaggacagcagagcaacggaagcagagagagagaccctcttggagacccagcacaaagcttctgagcctggaaactcagggtcagaaacacagtgctctggtatccaacaccaatcagaaatacaaggtatcatcacaggaactcgagaccactaaggataatcatagcaaatccaatcttgaaccaagcacaactcctaactactattagattggcataaaagtaattttggttcttgccattaaaaaatgcgaaaaccacaattacttttccaccagccataatatattaattcaacctctgccaacaaaggtcttagcagcaggaaaggcctccttactttcaggtgtaaaaactattcaccaaagtatcttgtcctatgtgagatgtgttgctattaacaaaatatatagagtcatatgaaaagccaagaagaaaacattctgaagatatgaaacattcatcagaaccagagtcagataacagagattttggaaatgagagagaattttaaataattattgttttgagaggccaaggtgggaggattgcctgaggtcatgagttcgagaccagcctggtcaacatggcgaaaccccgtctctactaaaaatacaaaaatcagccaggcgtggtggtgcacacctgtagtcccagctactcaggaggctgaggcaggagaatcgcttgaaccttggaggtggaggttgcagtgagctgagattgcaccactgcactccagcctgggtgacagagcgagactctctcaaaaaaataaaaaaaataaaattatgtttactatgtcaagaaaaatggtggatactatgcaagatcatatgggtgattacagcaaatcgatggaacctataattaaatattaatagaaatgtaagacatgaaaaatgccaaaacagagatgatgaatgccttcagttggctaatcagtaggctctaaactgctgaaaagaaaatcagtacatcttgaagataagttaaaaaaattaccttaactgaaacacaacagaaaaaaatgaagggaaaacaaaatcaacccagaacrtaatatacaaaagctgtgggacagtatctgtgtaaaatatgcacaactagaatcctagaaggagaagagaaagataatgggcagaagaaatattcgaagagataatggcttagagttttccaaaactaatgacagacacaaaaccacagataaaagaaactcagagaacatcaagcaaagctaggtgaggtgggtcacacctgtaaccccagcactttggttggctgaggtgggaggatagcttaaacttaggagttcaagaccagcctgggcaatgcagtgagaccccctctgaaaaaaaaaaattagctggacatggtgtgtggcttgtagtcccagctactcaggaggctgaggtgggaggattgcttgagcccaggagggttgaggctgcagtaagctgtgatcatgccactgctctccagcctgggtgacaaagcaagaccttgtctcaaaaaaaaaaaaaaaaaaaaaaaaaaaggctaggcatggtagctcacacctataatcccagcactttaggaggccgaggcaagcagatcacttgaggccaggagcttgaaaccagcctggaaaacatggagaaaccctatctctactaaaaacacaaaaattagctaagcatggtggtgcacgcctgtaatcccagctactagggaggctgagacacaagaatcgtgtgaaccttggagatggaggttgtagtgagctgagatcgagccactgcactccagcccaggtgacagagtgggactctgtctcaaaagaaaaaaaaaaatcaaggctgggcccagtggctcatgcctgtaatcccagcactttgggaggctgaggcaggtggatcacaaggtcaggagttcaagaccagcctgaccaacctggtgaaaccctgtctctactaaaaatacaaaaattagctgggtgtggtggtgcgcacctgtaatcccagctactcaggagggtgaggcaggagaatcacttgaacccgggaggcagaggttgcagtgagtcgagatcatgccactgcactccagcctgggcaacagagtgaaactctgtctcaaaaaaaaaaaaaagaaagaaaggaaaaagaaaaaaaaaaatcagagcacaccaagcaaggtaaataccaaccacaccacacctaagaaaaagaagtttcctggccaggcacggtggctcacggctataatcccagcactttgggaggctgaggtgggcagatcaccaggtcaggagttcaagaccagcctggctaacatggtgaaaccccatttctactaaaaataaaaaaaaatgagctaggtgtggtggcgcacgcctgtaatcccagctactcaggaggctgaggcagaagaatcatttaaacccaggaggcggaggttgcagtgagctgagatcgcagtattgcactccagcctgggcaacaagagtgaaactctgtctcaa

SEQ ID NO: 94271 - DNA, 118556 bp, Homo sapiens
  misc_feature (1)...(118556): n = A,T,C or G
tgtctcttgtgacaggatttgactcaaagtctattttatcagatgtaagtatagcaagctctgcttttttttttttttttttttttttttttttttttttgacacagggtctcattccattttccaggctggagtgcagtggcacaaacattgcttaccacagccttgacctcttgggctcaagtaatccccctgcctcagccacctgagtagctggaactacaggtgcatgccaccatgcttggctaatttttaaatttttgtgtagcaatgaagtctccctacattgcccaggctggtctccaactcctgggctcaagcgagcctcccaccttggccttccaaaatgctgggattgcaggtgtgagccaccatgcctggcctccctgctgtcttttggttaccatttgcatataataccttctttcatctctactttcagcctgtgggtatccttaaagcttaattcgtctcctgtagatagcatatagttgggtcttgttttaaaaatctatttagcaactcgatgtcttttgactggggaatttagtccaattacattcaagattattattaaaggaaggacttactatttttactttgttattttatatctggttgttttttagcatctttgtttatctctggttgttttgtagcacctttatttgttttttaattaaaaaaatttgataatcctctgtagtactaagctttgttttctttctctttattgtttgcataactgctatggttatcatgtggcttacgtaaaacatcttatagttatagtcaactgtttttagctgataacatctgttacatgcaaaaactctagacttttctcctctacatactgttttttttttctttctttctttttttttttaagagacaaggtcttgctacattgtctagactgaccttgaacttctaggctcaagtgatcctcccaccacagcctcctgagtagctgagtttacaggcatatgccatgcccagctacacaatttgtgtttttgatgtcacaatttacacctttttatattgtatattatttaacaacttattgtagcttttgttatttttttgaccattttgacatttgacctttatactagagatatgtatgctttacatatcaccagtacagtactggagtattctaggtttatctatatatttatctctactagtgagttttatattttcatttgtattcataataattattatcatcattttgtttatactagaactccatggctgtgcatggtggctcatacctataatctcaacactttgggaggccaagacaggaggatcactggagtccaggagtttgagaccagcctaagcaagatggcaagactccatctctatagtaaataaatacataaataaatattagctgggcacagtggtacatgcctatagttccatctacttgggaggaattcaaagtggcagtgaatcatgattgtgccactgaattccagcaacaaagcaagaccctgtcaaaaaaagaaagaaagaaaagaaggaaggaaggatggaaggaaggaaggaaggaaggaagggaaggaagaaaggaagaaagcaagaaaggctagcactttgggaggccgaggcaggtggatcacctggagtcaggagtttgagaccagcctgggcaacatggtgaaaccccgtctctactaaaaatgcaaaaattagccaggtgtggtggcagttgcctgtaatcccagctactcgggaggctgaggcaggagaattgcttgaacccaggaggcggaggttgcagtgagccaagattgtgccattgcactccagcctgggggacaagagcaagacttcgaaggaaaaaaaaaaggaaagaaagaaacttccattaggcatttcttgtagggcagacctagtagtgatgagtttcttcagcttttgcttgtttgggaaaaactttatttcttcttcatttcttcattcctttcagcactttgaatatataatcttattctttcctggcctataaggtttctcctgagaaatctattggtagtctaatggagattcccgtatatgtgacttgacacttttctcttgctgcttttaaaattctttatttttctttaaattttgacagtttgattattatgtgccttggtgaggatgtctttgggctgtatttattgggggatctttcagttttatgaatctgcccctctatatctgtcccaagacttgaaaggtttttttagcaataatttcactaaataagctttttcgttatcacttctccttccttaactcctataatgtgaatatttgttcacttaatggtgtacatttagttattataaataataataactaaaatagttaatcataatagttaatatttatttaatacttagtcttttcttttcattgaaacagggtctccttctgtcacccaggctagagtagagtagcatgatcatggcttactgttgcctcaagttcctgggctcaagggatcctcccaccttagcctcctgagtagccaagattataggcacatgccaccaacagctggctttttttttttttttttttttgagacggaatcttgctccatcacccaggctggagtgcagtggcgtgatcttggctcactgcaagctctgcctcccaggttcatgccattctcctgcctcagcctcccgcgtagctgggactacaggtgcccgccaccatgcccggttaattttttgtatttttcatagagactgggtttcactgtgttagccaggatggtctccatctcctgacctcatgatctgcctgccttggcctcccaaagtgctgggattacaggcatgagccaccgcacccagcctaattaaaaaaaattttttttgtagacatgaggtctccctatgttgcccaggttggtctcgaattcctgggctcaagcgatcctcccacatcagcctctcaacgtgctgggatgacaggcatgaactatcacacctggctaatacttagtattttctaagtgtgtcatgtatgaactcatttcttccttatgacaattctataagtacaggttcatgatctattatttacaattctgaaattgaaaatggtctgaaaaccacacttttaaaaactcacctatagtcccagctactcatgaggctgagatgggaggactgcttgagcccaggagttcaagaccagccttggaaacagcaaaatgccatctcaaaatatatatatttggcagcaaatcctggcctgaactggcatatgcctatctatagtcttttacttattcctcttagtatggttagtcatacattttgctgcagctctataaatatatttgattatagagtactgccctacaagctgttgggatgctgcataatacaaggtatattcattggatttcttttcaaaacctaaataattcttaactcagaaaaccatctggcaggggtgatgaactggtatagataacggtggtgaactggtactattattatccccgtttcacagctgaataaattgagactagaagttgccacttactcaagtttccattgttaacaaaaacagtaagcaatgtagttaataatatttttgagggcttctcgtggcagtcacttggttaaatgttttatgtgcattaatttaatcatcaccgcaaccctatgagtactattattatcctcatttcccagatgaagcttagagaggttctaaaattccccctggagacactgcgattcagtgtggtgagaaaggatttaaaaacaagccggtccaatatcaatatatttgattattacactatcctttacaaatctacaccaccagtcctttcctctcttctaatgccatttagactatatacccaattatctgataataaaaagatttaaaaaatataactaagatcattttactcacttgcttaaaactctatgactttctacttcatatggagcaaagtccaaattccttacgatgatccctttctacttctcccatctcatttcccaacagagcagacttctcttacgcctttgcactacgtataccctcttcctggaaggctcccagattgtcacacatttagctacctcgtcatttagggctcagcttaagctaatcctgtttttccctgatttacccagtaagagtaggtctttaatcataccattaattccatcattctctttacatagcacataaatatattttcaatgtttatctattttctttttcctttccttttaatgtaaattcaaccagagtaggcaccttgtctgttctggtttcttcagaagttccagtctctcatatggtaggtgcttaattttggctaaatgattgctgtacacgatcagtaaaaagtatctgcttgttattgaatggtgggagataaactgatgaggcaagtaggtgactaaagtgaaaatgtaaagatatcttgaacatcaacttgattagattttaatagcatgaacaccgccaagcagagtttctgatacagagaggtgacaaacatttgttgaatgactggacaataaatattattactagcttgaatcttgaggcaaattacttaacctttctgagcttagtttccttgtctacgaagattaaaactaacttttcaaggcttccctacaaattatatggataatgcatgtcatgtgcccagcacacagcaggtacttgttagtttctttctctttacatacatatatactactttatggtttacaaagttcttgtaagctcttctagattcatgacctcattttattcccacaatcttctgcagtacttctcattagcctcattttacagatgaaaaacagactcaaggattgagacatagcctcttcaggtaatgagaagccaatggacatgctttataagcataggagcgacatgataaaaagcagtgaggttttttgaagattaatctgttggcctataaaatgggctgaactgaaaattggagaaatattattttgactactagcataaaaatcaagtttaagggccgggcgcagtggctcacacctgtaatcccagcactttgggaggccgaggcgggcagatcacttgaggccaggagcaggagacaagcctggcctacatggcgaaaccccgtctctactaaaaaatacaaaaaattggcccggcgtggggctcgtgtgcctcccagctactcgggaggttgaggcacatttagaatcgcttgaacccggtaagcgcaggttggcagtgagccgagatcgcgccactgcactccagcctgggcgacagagcgaaactcggtcaaaaaaaaaaaatcaagtgtaagatgataagggcctggcagaagtgtttaaaagcctaatgaacttaaaaatattgaaaagccagataagtcccccaaaggaacaaaaatttaaaaatggtagttttcaaatctggctggctgagaaaatgatggtacaaacaacataaacaattgagaaatcaaacttggcaaaatcgttggtcagaagaccttctctccaatacctaggcagaacttctggcaaataatgacaaacatctgagccatttcttcagtgtcatagcgactttttgctttcactcctcccactggcttcaccacctggacaagagcatgttaaggtccttctgatcttgcttcctagatgcagtacggtgggaagcagaatctgggtagtgtggaattagaaaccaagctttcgaagttccaggacttggactaaatcgcctttttccttctctgtcaaataaggggacccttacttcacctccttccctagttttaagactagacaccctctccacatcagcacaaagcgcttttatttaggcgcgtgccgccaaaccaaaggcgctcgcgccgagctaagctcctgtcggtgagcttacgtcacttccggcgcgctgacgctcagttgtgcgtgccgacgcccgcgtcagcaaagagcggagctgagggtacccggtttgaagtcgtgcgggtcggaggactgcygcctccgctaccgtcttggacccctgcttaccggccgccgcggggacgagctcgggtaggcggcagggcagatgcccgrgggcctgcgctggaacgccccacgccgcaccggccgctcccctgtgctccgcggcctgggcctgcgccgctcagctctctggaaactagcgcctcagctgcgcggcgcgtaggtcgcggggagctccgaaccgccggcgcccggccatggcggtctccaggtgggtcttgctcctgacgagcaaactggaaggcgattcagggaaggcatggtctcctcttagagcccccactcctagagaagagcggttctcattgtcactgggctctggagctttcttcagtagacttcggagttckccccgtggtcggcgggggtttgggctcgggttactcctgggtaaatcggttcaataatgcctttttcttgttaatagaccccttggcacgttagagctgttttttctctttcctcaccatgtttctgttctctggtttctcttccctctttcgattctaggggagtctcttatctttctcagtattctaaggctggtccctaacctccatttcatgggaaaacttggtagttactgtcgatggaggggaaacctgaattactattatctaagagaccgtctaattatgttaccagttttaatttacgtttttaggggtatgttctttcctgagatgttttttaaaattaagtataatttctccttttgtttggcagtaaacattccaacgtcagcgttgtaaccttaagccaattatcgtattagcatcattttccgtaactaaggcgtggaagataaatcacagatcttatattcttttgaaatattgcctgtcaacaggaaagcccaggaaaactatagaaaaactaacgacatttatttgtatagctataggagaaacattactttttcctccggtatgatagaatggttggaaagcttttgtaagcggaatttggtgaccctctgtacatgtaattaagggatagttcctctgtgatagtgatcggatggattcaccaagttccttagagttgatatggtaacttttaatgagaattggattcttttaccatatagactgaaggaataaatgatgaaaacaaatagttttcatttttttataattaactgaacacattctttgagcgtattaagtgcacaagttttatctgttttgcaagggaaaggataacccattccttacagactccctagatgactgatgaaatagtgtgtgggagaagcccatgggagttgggtgaagggggttgctaggtaccgtagtatggggcatctgmtttttattttataatctattcaatgtgaggaaatttttttttaaataaaactgccttgagagaatacaagtgacattttacatttttgcaaatatagaaaggtgtatcttctaatttgttacctcccatataaatgcatgaatatatacattgtaaatgcattgatatgtaaacttaatataacatttatcaggtaatagtgtttaaggagatgagtacttcttttcttagagcaacctgtgcattttcacaggattggatgtagctttataaagacaaaatgaaagtgtttaaaaagaacctaattttcgggcaacgctaatctcttttttttttttttttttttttttgagaaggaatctggctctgtagcccaggctggagtgcagtggcgagatctcggctcactgcaagctccgcatcccgggttcaggccatcctcctgcctcagcctcccaagtagctgggaccacaggcacccgccaccacacctggctrgttttttgtatttttagtagagacgggtttcaccgtgttagccaggatggtctcgatctccttacctcgtgatccgccggccttggcctcccaaagtgctgggattacaggcgtgagccaccgcgcccagccaacactaatctctttacggaattttaggacagttaatatttctcaatgactgagtgggttttgaaggtactgtcttttgttctggatgttgtgtttcaaagagtagcactctttttctgtggatttttttctcgttcacttttttaaaagcctgtcatgtttttatggaagagctatttctgtgcttagtttccttgggctcagtagtaagcccaaggaaaacattttgagacacttgtgtgttttggggatagtgtcaattcttgactttttcacctgtggatttctttgaatggcaaattttagtttcaagctggccttctccatgcacgaagcacagttctgtgctaactaaacttcctttctctcctgttggtgcagactcattttaatactattttacgtaaaataggtggaaaatagcccaggagataaaaatcatatgctaaaatcaaatctaaaatattttttgcactgtttatttcatatgcataactgaagagaaactgtaatatttttaggacatttccaccagaatttccaacagatgggaaatagtaagttagtaccattattccctcaattgtctggtcaagaaatttgagaatgttctttgacttcccttttcctcccacaccccatgtccagccagttaccaaatccaatcctgtatattctgcctttctaatctttctccagctgatcatttttctttctataccagttaccacaatcctagaacatgccaccatctctagtccaagacacctttagagagacgcttcccttttgtcactgtaaagctacatccaatcttttgaaaatacacactcaaccctaggaaaggaagtactcatctccttgaacattgtatcacctgataagtctcatagtaagtttatgtatcaatgtatttggtatttggacatgtttagtacaagacaggagcctctctccttttcctgccttccatggcatctcatttcaatctgttcttcgcttcagtcatattatttactgatttgaagatttgaacatgaacatggtaatctttctaattaatacctttagttgtttcctattgccttaggataaagtccacattctcaaacaaacatatcttaccaagtcctttgtgatctggttcctgtgtcatctttttagattcatcttgtgtcaacttctctgtacttccccttcaccttcttctctcttctatcctccaccctccccagaattcattttgttaccccctactgtttatctttggaacacttcttagccccatctcaggtatggctagttctgaccttagtgtgtttttttgtttgatttttttttttttgagacagagttttgctcttgttgcccacgctggagtgcaatggtgcgttcttgactcaccataacctccacctcccgggttcaaacgattctcctgcctcagcctcccgagtagctgggattacaggcatgcaccaccacacccggctaattttgtatttttagtagagatggggtttctccatgttggtcaggctggcctcgaactcctgacttcaggcgatccacctgcctcaattttttgatctaagcttatatattaccttgttcaggacattttctctggttttacttcatctgagctatttgcaccaatacatattcctatcagtcataatatttatattttgtaattggttaattgttctcttacttgctggattaacataawctctgagagaaggaaatgtgtctttgatttttccatgctcagaatgcctggctcctagtgggtgttcagtacatttaaaaaaaaaatgaatgaatgattttgcttcttgctttggtaccttttgagttgccatatgagttgcctcataaagcaaaataatggtattcaaagatataacaattattatttaaattattcacaagaaacactgaaagcctgtaacatatactaatttgttttttgctgaggttgactttgtggaagcaagtcaagtaactagtgaatgactagctgactttccagcatccgcatcttagggacaacattgttctctactcctacatttgtaggagtatgattttaccgtaatttgtgcatagtagactatttccagtgtttttcagtgagtacttttgagtttaactgccttttttctttttttttttttttttttgcagtaaggaaaactttcactatagctttttaatattggccattttctaattttaacaatcatcggaatatttttttctttttaaagctatctcctataggaaggcaattagaataattttttgaagtttataatatagtaaattctgtgatagcatggccatttataatgcaaaattgatatgatgtattttatgtggtcaaattttttagaccctgcttaataggcttggttttactgtactttcagttgtaagaatgtggcagattatgaaatgcatggccaactcttgatctgtagctgaattacatcttgcaaaaataactttgttactctctaaaattgtaaatacaatcatagcatttgaagttctctgtcaaatccagtgaaatatcactggaaaatgatatgactcttttaaacccttagtaaaagacccaaaatccaaatgtaggagtagagaacaatgttgtccttaagatgcggatgccggaaagtcagctagtcattcactagctacttgacttgcttccacaaagtcaacctcagcaaaaaacaaattagtgtatgttacaggctttcagtgtttcttgtgaataatttaaataataagtgttatatttttgaacaccattattttgctttatggggctttttctcattatcatgtgttacttagttgggattttgccaccaacggtaaaagcaacctttgcgatcgcagcactgcactccagcctgggcaacagagcaagaatccatcccccccccccgccccccaaaaaaagcaacctgagatggatttctttggcatttttgttgtttgtttgtttgtttgtttttggaggcagagtctcactctgtcctccaagctggaaagctggagtgcagtggcacaatcacggcctcaagtgatcctcccacctcagcctccccagttgctaggaccacagatgcataccaccatgcctggctaattttttttgtatattttgtagaagtggggtttcatcatgttgcccaggctggttgcaaactcctgggctccagtgatccacgtggctttgcccctaaagtgctgggattactggtgtgagccactgcgcctggtttaggtttattcattggtggggaatctgtagctgtgttgggaaccatgacttaatacaattttttaaacagcttgtttttgctacctttgcctgtttatgccacaattaatggaactgatcattgtatattggctagttaataggaacatagtttttccttaatcagctagagaaagtttcagaaatatatagttttccctcagcgatctgtgctgtaaaggtcatgtctaaaatgtctagacagtacttataatatgactgttttaaaagccataccttagatttctcacatatctttgcatttgaaaatgttacagtgttcagaaagggttcagaaaaaacaaaaacacatcctcttgtggaagaaacaaattgctacatatagcagacctttgctcaattttgttaattttctctttgcactgttgatacttcagagcaacattgtttcaacaggcctattctgtcaaataaaaggaagtttcttgatgtaggggacgttcagtgggtcctggacaggaaaatgttaatgtagaaaaaactaccttaattaccaataaaggacaacacaggttttccaggcctattcctccctgttaatttatttttaataatttttttttaatagagatgrggtctctctgtgttggccagggtggtcttaaactcytgcctcaagcattcctcccgcattggcctcccaaatgctgggattacaagcatgagccacctcacctggcccttattgttaatttcaatccattataagatgacagaaggaactattgtaaattataattcatcaaatatctcatactttaaaaatttagagataaactagaaaaagtagaagaggcattaatcaaagcttttccatttcaatcccaatggtaaattcctccttatttctttggcgtatttctcaaggtactagtttgaattattattttaaaawttttttaattgtgacacacataaaaatagactgttctaaccatttaaaaatacactttaaaatgtattatgaattttacatattaatacataatatgtattaataagaagttttaaaaccacccatactgctgctaaagaacctagattagtatgtactatgttttgtcattaagataaagtcatgcaagaggctataggttgttcgatcagggatggagggtagaaaaaaatgtcttgaaggaaatagcatagcttggttgtacattttcaccattcttcatttaaccaatatttactgagtgctttctatgttataggtgctagaggtatagcagagaaaaaaactgtactctccattctcatggagtttatggtccagggtagagtggggtaacttatctagcaagcacctgcccttacacctggctttggtatggtttcacaccttcatattgattcttagtgttctgtgtgatatctttatgtttaaaacaacataacattaacatagtttcaaattacccacaacatgacctagaaagtatatgtttaaaaacactagagaatttgttggaagttgtttcttttgaccttaatgataatatgtgcactgtactaagttccacgtattaagtacacactgtacactatactaagtaatggtcattatctttccttacttcctgagtaacacagaaaagtaaacattcaaatcatctatatttaaaattttactgtacttttgccacgtgtaaaaaatgtataactaaatggctactcttgactggtcatgcttttttagttaaggccacaaagctgtctttttgaggtattctgtcagttgacctttcctaatttatcagagaggttaaatatattttgaaaatatcagtgaggctttttgcccctcccctcccgagatgttttagagtggaaatacagtatgtatttgtttattaactatgacgtagtaatctaggacatgttttattgtttaaaatgcatgacatttctttctgtttatttttatggctttactgttatgaattaacataatgcaaacatctggagaggagaggggttagattgcaactgctagcataacctctactactatgtactctttcctttttctaggcagtctttagaacagttgcctgaaatcacaggttacatgaatcatatcttgtttagctaattctcggaattgacatccagattgaaaatgggccagatttcttattctcaataaatttataaccagtggatattacaaaatataattttcttatgttttacttatcttctatagtctttggtaccttccatgcaacttgacatctgttacctgtgtctcctccatctgtctgtctatccttcagagaatgaagaatgttactttttcctgctagctgtgtgcaacagaagttttagccaaaagtagtatgggagtaagtactgtgttccctcagtcagccctccttttaactttcccttctcttctgaccatctagcttccttcagacctctccctcaccaagggccctgtctaccctccaacataatactgactctgtctcacgttcttttcctcttccccacaagttcactgtaccagccttttccaccgtggcctggccctgatgcttaccctgcttgcctcatagctggctatcctgagataacaggtcagactgccctcttgtcagatctttgtctgctcatctctttgttcttccttttatgtggtgtccaatctgctgtcctgaagagaggaatggagaactacgaaagtggctttaaatcaagagaatcaaagaagcattcttgtgtctccattcctctattcagggaggcaattttggttaccatccaaagtggaagaagtaaggataaacaggcttggaatggatgagagaatgagctgatctgctaccctcagggcatttggctggtgggagagcagaggtgacctgacatagcattgggataaaaggatctgcaaaaaggagagtcaagaggaactgtgtgkctgtgggacagtatcagcaattaggttagagaggagtctaaggtctttgggcaggagttctaagtgaagctgggtagcagaggaccaaaggaaaagtttaagaaggatggaaattattgaaggaatacagtgcctattgcatggcatttttcagcttgctatttgggacaagcgtaactgcctcattcagaaggctgaagtactgctgtgctgatcttttcagttactgaaacattacattaccaactgattttttatgtaaaactgctgtcacagattaaggatgtttctcaaaggaagcaggaaaaaaaaaggtaatataaaatattttttctttccttaaagttggttcttaaacttgtccccaagaaacttgaacttttccttaagtatagttttagttacagtaaatgtcaactacataacaaatatttgaatactgtgcaaagtgttgtgcgagacaaaaagaatgattgaaggagatgaagcctaatgaggaaaattagacctcatgtgacaaattaatgtgagagatgccacaaaaaaatataataaatacttaagtagctgttcaagatgagaattcatgtggatttcagaaaaggaagtaatctctgttgcatagtagtttgaaatggtttcaagaaggtgaagaacttcagctgaatcctgttggatgggagctagctgaacagttgaacaaagagaaaaatactttatttgtttgctgtagcacattttattctcttgttagagaagcaagctcaggcacacccgaagatcacctctagtggtgtatctggttaaattccaggtgatatacccatattctcagctgtgcctcccaccaacagttcccagtctcacacatggggccattatatctgcacagctgcctgctgttgcagtgaggcagagtacatacccactgcaaccccaaccagtgaccattctggggatctggcagaaactggccaggaaaccacccccttgaggaggggtgagccactgtaaccctagcttgaaggggtgtgagagacattctgagtggaggaaacagtataggtaaaattgtggaaaccaaaaatacccacatttgggagatactttttgttttggattactttctggtaggtaagtgtgagccattgaaagttttaragtaaggtagtgatttattcgggggcgttttaggaagttaatctggcaacaggatgacaaggcagttgggagtgtgaaactggcactctcagatggcctggatttggggaatatttgttctggatataatttaaacaaataacagtatacagtttcctcagggagaaactgatgagagttgagcagtcaaggattgaatatgagtattctcccgatattcatattaagagtattaagaataggagaactaaggaaagaagagtttggagaacagggtaatataatrtgcaacttaggaaggaaagtattgtaagaatggggtgcttgctggtcgcagctgtcaaagaagagtcaagaaaaattgaccttgtaaaaaactattggatttggagcctaagagttcattggtgaccttcaggtgtggtattttggtgtagaaagatggaaccttgatttatatggattaaattgtgtatgatgaggaaataatattttaaacacttgttcaagatgcttggcagttaaagtgttctagagagtggagatcaagcagtttattttctcagtagagagagagctctgcatattggaagaagggaatggattagtaacactgatttgagatattggagaaaggatgattgaataaggatagaagggggatggtatcaagacaaaagtaggtcaagaaaccattttttcccctttcttggtcctactatctgtctgactgactgttcaccaatcctatagcaaaagccagtgaatgaatgggtaaaggcaagtgtttagatagccttgaatgaggaaggagaaatatggtgtcaaaagattggatatgtctgtgtatagtgtatgtgtaaagtaaattaattttagaatgtcattagaaattaactgtgttgtattactctctttgtatgactagcttcatagtttgaggtcttagatttaagactttaatctattttgatttaattttttttttttaagacacagtctcactctgtcacccaagctggagtgcagtggtacaatctcagctcattacaacctctgcctcccggattcagaagcaattatcctgcctcagcctccctagtagccgggactacaggtggatgccactacacctggctgatttttgtatttttagtagagatggggtttaaccatgatggccaggctggtctcgaactcctgacctcaagtgatcctcccacctccacctcccaaagtgctgggattacagacatgaccacgcccagctgagtttcctcccattttacttcatgtatcacactgctgccagattaatcttcctaaagcatagtttcagttccattagtttcttgacccaagaccttcatggttgcaagttcattaaaaggtctccacggtagggttccagctacttctgtagctgtatctcccactcttctcttaagtgtaccctgaattgcaaccaaactgttattcatttccctaaatatactctcccttctcttattgttgtgttcttgttttccttcttccgggtatttcttcccctttccctttcaccacctaatctccaccagtgttaaaattattttctaccactaagatccatctcatacaccatttattttatgaagccttttcagtattacatagttggggatataatattcgctcctttctttcataatcctcaaagcactttgtactttttttcctgccatgtatcttattgtacttgacttacctgctcccttcaaccccagtagcaagttccttaagagtagagattaggcatctcttgtagtcctagcataggtcacttttatttttatttttgcaattttagaaaaagtattattttaattgacagwtaawtgtacattattatgggagtagtgtgatattttcatacacatatacaatgtaatgatcatattagcatattattcaccttaaacatttatcatttctttgtgttgggaacattcaaaatgcctctcttctggctatttgaaaatatacggtaaattgttgtttagtcactctgcagtgccacagaacactagaacttgtttcttctatttagctgtaaatagacggttaaccagcctcccccatccctcttgcttttcctacccttcccagctgctagtaaccacttattctactcttgacttctctgagatcgactttttagcttccatttatgagtgagaatatgcggcatttatctttctgtgtctggcttatttcaccataatgtctttccggggctcatttatgttagcgtaggtcttcattcatagcatctgctcagtacgtttattgacttaaacttgtacatacgaggaaaagcatttgagaataaccattgtatttttgttatttcaggctagatcgcctttttattttactggatactggcactactcctgttacaagaaaagctgctgcacagcaacttggagaagtggtgaagcttcatccccatgaactaaataatctcctgtctaaagtaagaacttttttttttcttttagcataatacaattgtagagacttattcatggataggaacacaaaaataaaggtaaacatcatcttaatttttaaacatttttgctatttcttttttttttctggtcacaagacttaaactttttttttttttaatcaagtttagtagcttaagggatttgagtatagatcgttttgcctgtggcacaaatttgaatctgtcccagtttggtaataaactaagttgtttatctggtttgttagtagtctaacttgttcttaatgactaataattatatcatagttggtagtcttcaaatggatgagtactcatgggcaatgattgaaatacatgagaagctggagtcttgttacattctaagttatcagctgtttgaaaatggaggctttctgctttggtgtatcagtgttttcataatcctagtccrttttcttcccttaagcaactgctgtatttttactaaactctgtatgcgtattgaagtgtacctgtatggtaataagtggcaaattctacacatttaatttcctgatgtgcagagtaaagcaggagtgctttgtataggaggaggggagttggggaggtagatacaggatagggtaggggagcaatatgattgcccagatatagggagcctcaggatctctctctcttttcagtttgacccccttttttcattctcatctgcccatctctgttgagtatgagtgggagttctaagccctttctcagcatacacatctgtactgtgtggttgctaccacaaggactaacagtgactctctttccaacataattcccacttagatattatcagaactttctaactaggatgtagatggagagacagtgatttgatacctacaggctccacgttcttagaatgaagaaggatgcatattaggcagtattcgtgtgtaagttggtgacagagagaggcaacacctttcttctccttagcccaggggaagaaatggaggactgaatgacctgaaactgtgaaacaatgaacaagcctcatctgtgctgaactgagaaaagttttccagccttcccagtgagttctggtcttcttcactcagacctcagcatattggctaccatcaaatcattcccaaagaggcgaagtttgcctttagcactgtctcaccgtctttcctttttcctcggctgtcagcgttttcctgttgcccattggttttgttttcttttttttttttttgagacagtctcaggctggagtgcagtggcgcgatctcggcttactgcaacctctgcctcctgggttcaggcgattctcctgccttagcctcccgagtagctgagactacaggcgtgcaccaccatgcccagctaatttttgtatttttagtggagagggggtttcaccatgttggctaggatggtcttgatctctggacctcatgatcctcccaccttggcctcccaaagtgctgggattgcaggcgtgaaccaccgctcctggccggttttgtttcttaaacagctttattaaaatataatttacataccatgagtttcaatttagtggtatttagtatattaacatggtgtacagcagccatcaccgtactctaattttaaaacattttatcaccacaaaaagaaacctcatacctactagcagtcactcttcaatactccttcactcatgcccagatcctcgacaaccactaaactaactttataggaagatttgcctatcctgaacattttatataaaatgaattgtaatctattgtgatcgatttcttttgctcaaaataatgtttttatattgtagcatgtatattcattcttattgccaaataatattccattgtgtggatatacatgtgtacatcttactgattttttggttgatgaatatttgggttgttttcactttttggctactgtattatgaaaaatgctgctatgaaaatttgtgtacaaaattttggaggttttttttccattctccagagtatatatatacctgagagtagaattactgtaccatatggtaactttatgaggaactgccaaactattttccaaaatggtcccattatttacgttttcaacagtagtgtatgagaacttagattgtccacatccttgtcaatacttcttgactgactttgattatagccatcctgctggatatgaaggggtttgatttgcatttccctgatgactaatgatatcaggcatatgtatttattattcatttgtatgtcttcacttgatcttagccaaaaagcagagaagcaatacatttgtatatcttctttggagaaatgtctactcagatcccttgcccattttaaaattgggttatcattttattatgagttgcgaaagttcttcatatggtatagttcttcatatacaaggtatccaaactatacaaaggtatatgattaggaaatagatatttgatttggaaatatactcttctatgagctgtctttttactttcttgaacatcacttctgcttttggtgtcatatctaagaaaccattgcctaatccaaggtgacaaagatttacccctaagttctcctctaagagttttatagttttagctcttacttttgggttctgtggtcagttttttagttaatttttgtgtatgttaatgagctgggtgttcaacatcattcttttacatgtggctttccagttatcccaccaccgtttgttgaaaagactattatttctccattgaattgtctcaacacctttgttgaaaatcagttgaccatagacacaggttatttatgaactcttaattctgtgccactgattcgtatgtctatcattttgccagtaccacactgtcttgattactgttgctttgtagaaagttttgaagtcaagaagtgtatgttgccaagtatggtggtacatgcccataggcacagctactcaagagactgagacaggagaattgtctgagggcaggagtttgaggctgcagtgtgctatgattgcacctgtgactaagacactgcatttcagtctgggtaacactgagaccccatctctaaaaaataaaaataaaaaaagtgtgagtctactaaatttttttttcaagattgctttggtaattctgagtcccttgcatttgcrtatacattttaggatcagcttttccatttctgcaaaaaaaaaaaarggggggggattttgataggaattgtgttgaatctcttgattaatttatagtatattactgttgtaacaatctgaagtctttgaatccatgaacacaaggtgtctatttagatctttaatttcttcaacaatatttttagtgttttttagctttcattgtacaagtcatacactgcttctgataaatttattcttaagtattttctacattctgatgctactgtaaatggcatggttttcttaatttcattttcagattgtttaatgtgtggaaatacaattgattttgtgtattgatcttatatcttacaaccatactaaacttgagattttataactttcaattctttgtattaagtaatgggacttaatgaataatatgtattttgctttttagtatgtaaaatgggtgttatttttaaaatgcacttaaacattcttttattacaagtttcttttctttttgagacagagttttgctcttgttgcccagattggagtgcagtggcgccatctcggctcactgcaacctctgcctcccgggttcaagtgattctcctgtctcagcctcccaagtagtcgggatgacaggtgtgtgccaccatgcctggctaattttgtattttttgtagagatggagtttcaccatgttggccaagctggtcttgaactcctgacctcaggtggtctgcccacctcggtctcccaaagtgctgggattataggtgtgagccactgtgcctggccacaggtttcttaaatcccctttttaaggtggtagtgatttttctctgaatgatagaatcttgtaaatgaatttaataattctaaggtgttttatatgtatttggatggctgccaaattacacattaataacaagtaaatttgtatttctctgttctggctaccttgcgcaaacaatatttttgtatacgtaacttttattttataatttttaaggtgttgatatatttaaggagtgcaaattgggatacccggattgcagcaggacaagctgttgaagctatagtgaaaaatgtacctgagtggaatccagtgccgagaaccagacaaggtgcttttaagtggagaaagtagttttaagtaaaaacctaactgtagaattaattataatatgcgttttgtattttaataatttcaattttaaagtcttaatttccatgcttttaggtacagctttgtcaggaaatgatactgaataaggtgatttttcaccacattaaaaaaaaaaaactactggatatagaaaatgtttttgtatacattttaaattacaaattctacagtatgcttgatttacaagggttattacttcccttcaagtaattgacattctaaaaaaagttaaatcagtacagtgtaaatatttgaaagtctttttttcttgttgctgggagaatagtatagggtagttattttctacatttaagcacaattatatatggatatttggaatgtgaagtcttgttttttatgtgcccttttttggattttttgtagtgggaaaaaatgtgttctgattgcctgtaatgacatttaaaaacaaattacatgcttttgaaaagctggaaagctgcacattttaattaaatcaaaatttaatggtacaactagattcgttttcaactgacttttattttattttattattttgttttattttatttattttattttattttattttttcgagacagagtctcactgtgtcacccaggctggagtgcagtggtgcagttttggctcactgcagcttccgcctcctgggttcaagcaattcttgtgcctcaacctcccaagtagctgcgattacagttgtgcaccaccatgctcagctaattttgtatttttagtacagattgggttttgctttgttggccaggctcgggggggtggggtttgaatccctggcctcaagcatgatttagcctcaagctgaggcccacgtcagcctcccaaagtgctgggattagaggcatgagccactgtgcccggcctcaactccctttaataacatcacttttatcataagtcttagcttgcctaatactgttgctttatatttgctgatacctgttattttgagttattttgttaatttgtcttctctcattaaatgaaatgtgtgactagagaagttataacttgttttagaaaagagccttttccttttcagcttgttatccccacttagtttggtatgtaaagatggtacaacttagttccgtttttaaaagacttaatttttttaaaaaactcgcattaagctagcattaaatttttaactagctttaaaatttttactaaatgaatttgcttatcatcactagaaaacttaaaatactaatagaaattccttttaagttaagcagttatactttagtttacagatgaatttcatgcagatgccagctaaacaaactattaagtcagtaagtaattatattttaacatgtataacttacagctttttgaggaaggaatacagaacattttatagatgtttttagacctcacatggatatgtgattttagcaagttaccaggagattcttatttgcccagagtatgggaactgagtcctgttgagtgcatagttgctttgtggctcagcctgttcctcaggtatggggagggatgattcttattagccttattcatgaatacattctgcgaatatttttgtcttctaactgagcactataataaactcatgctgttaccttagtatttttaaactcttaacagtaagtagagacagcatgatatttaacatatacattttaacatgggaatgcaatttctttatataaataacattttgcttttgtggttggacacagttacacatatactcactaacatctgatggtctgtggaaaaggaaccaccaacttattcacagataactaagaactgatcataaacccacagtagcttttctacttactacacttttacttttctcaaaatattactatccgggtacagtggcttacgcctgtaaattccagcactttgggaagttgaggcaggaggggattgcctgagccccagagtttgagaccagcctggggcaagatggtgagacccttgtctctacaaaaataaataaaaaacacttagctaggcatggttgtgtgcacctgtagtcctagctactctggaggctgaggcagaagaagtccttgatcccaggagttagaggatacagtgagctgtgattatgccactacattgcagcctgggcaacagagcaagacctcacttcttaaaaaaaaaaagtttgtgtgtgtgtgtgtgtgtgtgtgtgtgtgtgtgtgtgtgtgtgtgtaacccatgcaacccaagtaatgatatgctattttctttcattccacactttggctatatggtcaaattaatatttttaaacctcatgtagaacctacttccgaaagttctatggaagattcacctactacagagcgattgaattttgacagatttgatatatgtagattgttacaacatggtgcatcactcctgggatctgctggtgccgaatttgaagtccaagatgaaaaatcaggtstgtagtggttctgagaagaaagtctaaaatttgttttttcagactaatttgtcactgtggtatgctgttcattagtyacacgtaaactaacatgtcatgaaatgtaaattaactraagtttgcaggtggcgggggatgctatgaatgggaggtaacccagcagtatttggtttaaagctacaatatgagtattttttctcctttaagtgaatatgtgcatcattagttgatacatattaatatttcagcaacaattttattatgtagtatggaaattataaagtgttccccaagagccccagtttaatatattataaaatcaggattagtatagatcgtggtagtgttttcacaattctggaaatttgagagattgattgttttgtttttatcacatatttctgatattattgggtttactcatgctggtgtccaacgcaaaaactaagagtgaaaaataagacttggataggtattcacacctgtaatcccagcactttgagaggccaaggtgggtggatcacctgaggtcaggagttcgagagcagcctaaccaacatggcgaaaccctgtctctactaaaaatacaaaaattagccgggcatggtggcgagcgcctgtaatgccagctacccgtgaggctgaggcaggagaattgcttgaacttgggaggcggaggttgcagtgagccgagatcacaccactgcactccagcctgggcaacagaggtagactctgtctcaaaataagaagaaaaaaataccggataggtattgtcctaatatttttaaacttacagaatctatctgaatataaaattactgttttggccattcaagataatggcctggagtggggaaaaaaccttgatgttttaaatggatttttgtaagtaaataatttgcatttttgagtaaaaaacaaaacagaataacactctgttgctaattaatcgtcatttagaggcttattaatatattcacttttttatcataaaaaatgtcaaatactcatttcatcttgtttagtatggtttctattaaaagatctagttatttttgcagagaattaagaggataatttgcttaagttttggaaaagcatagtttttctaataatggaggtaaaactcttcaaaatcttttcatttatatcactaaatagtaagtttactaactttactagtgtattcatggacattatcagagatcaaaattatatatattttggttttgccatattcttatttcatagatctatgaagaagtctaggtaattgtatttcaaagaaaagccyggctcagcgtggtgggtcacacctgtaatcccagcactttgggaggacgagacgggcagttcacctgagatcgggaggtcgagaccagcctggccaacatggtgaaaccctgtctgtactaaaaatatgaaaattagctgggtgtggaggcgggtgcctgtaatcccagctactctggaggctgagacaggagaatggcttgaacccgggaggcggaggttgcagtgagctgcgatcgtggccattgcactccagcctgggtgacaagagtgaaactctgtctccaaataaaaaaaaaaaaagaaaagtcctataggtgattctgatatgtaaccaggattgggaactgcagtttcttgggaactcagttttttagtgctagtaagtcacagcttgctgaacagtgcttgtttaaaaccctgtagttaggttttctttaaatgttgatctgtgtttgtcccctcatatatattaatgacaccatatatgattagtatacatactggtctgggtttcctttgcagctggttgtgtagattatttcccccaatagggcttygcctggaatgagaggaccaattttaggctctgtgtaagtgtattggggttgtgatcaagcagtcttttggatgcctagtgtttttccctcctgggtagaccaatctttaaaaaaattttcaagcagctttattgagatataatttatacattatacaattcatcatttaaagtatacaattcagtggtttttagtatactcacaggtatgtgtaactatcaccacaattttagaacattttcgtcactttaagaagaaaccccatatccttagctatcacccttttatcctcttacttccttccctcctcttcccagcaaccatgagtctacttttggtctctttagatttgcttattctcaacattttatatttggtcacataccacataacagcatttaagtcagcaacagactaggactgcatatacagttgtggtcccataaaattatattactgtatttttactgtaccttttctatgtttagatatatgaatacttaccattgcgttacagttgcctacagtatttagtaacatgctatacaggtttgtagcctaggagcaacaggctataccatacagtgtagctgtgttgtaggctttatgatctaggtttstgtaagcacactgtgatgttgacaacaaccacaaaatcactgaatgacacatttctcggaatgtactcatcattaaatggcatgtggctggtaaattgaatcatacaatatgtggtcttttgtggtggttttttttttacctaagagaatattttcaaggttcatctatatgacagcgtatatcagtacttttttttcttttctaaattttattactgttaagggatgtatcaggtttttaaaattgtggtaaaatatatataacaaaaaatttaccatccttaaccgtttttaaaacttaagtttagtaatgttaagtacagtcacattgttgtgcagccagtctccagaagtcttcatcatgcaaaactgaaactacctattaaacgtcaaatccccatttccccctttccccagcccctggcaaccaccattctttctgtctccatgaatttgactactctagatgcctcatgtaagtgaatcctacagtgtttgtcttcttgtgatgggcttatttcacttaacttgatgtcctcaaggttcatctgtgttgtagtatgggacagaatttcctttctttttaaggctgaataatagtccattgtatgtatataaattttgtttatccattcatccatcagtggacacaggcttattccacattttgactgttgtgaataatgctactgtgaacatggatgtacagatatctgtttgagttactgctttcagttctttggggtatatacccagaagtaaatggctggatcagatggtcattctatttttaattttttgaggagctgccattcagttttccctaacagctgcatcattttacatttctaccaacagtacacaagggttccaatttctctacatccttgccaactcttgttattttctgttttttgatagttgccatcctaatggatatgatgtggtagtatttcattttatggccaaataatattccattgtatgaataccacaatttgtaaaagcctttcattagttgatggacatttgggttgtttctaccttttatctgttttgaaaaatactgctgggaggcaaaggcgggtgatcacctgaggtcaggagtttgagaccagcctgaccaacatggagaaaccccatttctactaaaaatacaaaaattagccaggcgtggtgacgcatgcctgtaatcccagctacttgggaggctgaggcaggagaatcgcttcaacctgggaggcagagattgcggtgacccaagatcgcgccattgcacttcagcctgggcaacaagagtgaaactctgtctaaaaaaaagaaagaaagaaaaatactgctgtaaaaattcatgtacaagtttttgtttggacatatgttttaatttccctcaggtagatacctaggagtggaattactggctcatatggtaactgtattttaccatttgagaaactgccagagttttccaaagtggctctgctattttacattcaatttctcaacatcttttcctaacacttattatctgatgttttgattatagctgtactaatggtgtgaagtgatatctcattgtgattttgatttgcatttccctgatgtccaataatgttgaacttcatttcatgtattgaccatttgtataccttccttagagaaatgtcaattcatataacttgcacgtttttcattgggttatttgtccttttattataagttgtaagagtatatgttctcaatacaagcttcttaccagatatgtgatttatgcatttcctttttttctttttcttttcttttttttttttgagacagagtctcactccattacccaggctgtagtgcagtggtgtgatctctgctcactgcaacctccacctcctgagttcaaatgattctcctgccttggctccttcctgcagtagctgggattactggtgcctgccccacacccagctaattttttaatttttagtagagatagggtttcactgttgtggccaggctggtcttgaactcctgacctcaggtgaaccaccggccttggcttcccaaagtgctgggattacaggcatgagccatcacccccagcctgatttacacatattttctactgctctataggttatcttttcatttcctctgtggtaagaagcataaaagttttaaatttttakgaagtccaatttttttgtattgttttgtttgtttctcaagtttttggtattatatgtaagaaacttgccaaattcaagctcatttacctctgttttcttctgagagttttatagctttagtttttagttattttatcgattttgagttttttttgtatatgttttgaggttaagggtccaacttcattcttttgcatgtggctatcctgttgtctcaacactatttgtagaatatactgttctctttctcattgaattgctctggaactcttgtcaaaaatcaattgaccatcagacacataggtttatttcaggastcttaattctattccattgatgtctattcttacgcgagtaccacattgtctaaattattgttgcattgtagtaagttctgaaatcaagatgyatgagcctccaactttgttcctgtttttcaagattgttttggttattctgagtctcttgcatttccatatgaattttaggaccagtctgtcaatgtttgcaaaaaaaaaaaaaaaaaaaaaaagccagctgggattttgatagcaattttgttgaatctctgtatacatttgggaaatattagtgttttaacaatatttactcttatgatgcatgaacattttcatttagtttttaatttttttcattttatacttgacagaatacaagttgctatygtaaatagaattgttttcttaatttcatatttgggcttttgtttctttatatcttttttctctttgttctttagattgggtactttgtattgctttatcttttttttattattatactttaagttctagggtacatgtgcacaacgtgcaggtttgtcacatatgtatacatgtgccgtgttggtttgctgcacgcattaactcgtcatttacattaagtatttctcctaatgctatccctcccccatccccccaccccacgacaggccccggtgtgcgacgttcctccccctgtgtccaagtgttctcattgttcagttcccacctatgagtgagaacagtattgctttatctttaagttcacttgcattttgtcctgttatcttccattaagctgttaagtctatccagtggtttaaaatttttttttcagatactatatttttcagttttagaactatttatttatttatttatttatttatttatttwgagacaggatctcactctgttgcccaggctggagttcagtgatatgatcgtagctcagtgcacccttgaactcctgggctcaagcaatcctcccatcttgctaggaccacaggcacgtgccaccacgcctggctaattttttatttttttttctgtagagatgggggtcttgctatgttacccaggctggtcccaaattcctggcctcaagcgattctcccaccttggcctcccaaagtgctgggattacaggtgtgagccactatgcctgccccagaacttcttttttattaaaaaaaaaaaaaagttatattggcatattttgcacattatttaattcacctttttaaagtgtacaattctatatatttttaaaattttttgtccagatgggattttgccatgttgcccaggctggtcttgaactcctgggctgaagcaatcctcctgcctcggcctcccagactgttgggattacagatgtgagccactgtacccagtctggttcttttttatagtttctgattctctaccaaggtatcctatctttcattcattgtgacagtatcttcttttacattgaacgttgttatattagttgcttacgaatcttgcattctggttgggtgcagtaactcaggcctgtaatcctagcactttgggaggccgaagtgggaagatgtcttgagcccaggagtttgagaccagcctgggcagtctagagagaagaccccacctccacaaaaaataaaaaattaactgggtgtggtggtgcatgcctgtggtcccagctactcaggacgctgaggtgggagaattgcttgagtctaggtggacaaggctccagtgagctgtcatcatgctactgcagtccagcgtgagtagcagagcaagagcctgtctcaaaaaacaaacagaaaccctaaataaaaccttttaattctaacatctgagacatctcagagttggtatccattaattatctttcttttaaaaatgggttacattttcttttctttgcttttaattttgtcagttattctgcacattatgaacgttatgcggtgtagactagattctgttacattcttccaaagattgttttgcttgtttttgcttgcttgttttagcagacatttactttggtggaactcaaaatttcaaactcattcttctttgctctggacaatagctcaaatctcaattttagctttttagattttagctttagcwgbattgtctggagtctgctctgggcatgcatagttcataggtcaaccagagatttgggctgagtttacagagaattttggccctcttctctctggctctctttcttttggggttttccctttctaacttcctgggattgtaatggcccctaactctcttctcattcttcaagccaagccagaaagactgtgggttttggccaggtgcagtggctcacgcttgtaatcccagcgctttggtaggccaaggcaggaggactgcttgaggccaggagttcaaaaccagcctgggcaaacataataaaccccatctctaaaattaaaaattaaaaaaaaattagccaggaatggtgacacatgcatatggtcctagctactcataaggctgaggcaggaggactccttaagtccaggagtttgaggctgcagtgagctatgattgtacctactgcactccagcgtgggtatcagagtgagagaccttgtcctttgtgggggggggggaagaagactaggtttttaattcagattttagctgycacgcatttcatgtactggctctatcttcaggctaaaagctacaaaaaggggaaacttttgttttttgtagcttttcgcttttgtagcttttagcttttagtgctattcccatctttttaagtactgacaattcccctaagtaaatgccttttttttttttttcctggtgcctttaggtagtttgttttttctgtttttgccagtttgttaggtgcagagggttagtccaataggaactaactcagccattattagaagcagatcgttattgtttttaaaatatcaaatttttttcagtaaggtataactgtcttttacagcttagctgttttaagggcaaatttttatttttaaatgccctttggtatgttctgttttgtctgttttgcaccgaaggattgagggttttacttgagacatttaaaaacctgtctacttttattctctttattatttgggatattagggctgtatcagctcagaatacataaaggctacacttggagtaagcatttgtttgttgagcccttttactgttgaacaaaatctagatgtttttttagcccagtgagagctttcgtaggaggtacaggtgtagctataaaataaaattgatttgtttccatagagatgtattttttttttttttttttgagacagggtctcactctgtttcccaggctggactgcagtgttttgatcacagctcactgcagccttgacctgggctgaagcaagcctctcgccttcagcccctggagtagctgggactacaggtgtgtaccatcatgccctgctaattattttttatagagatggggtctccctacgttgtccagactggtctcaaactcctgggctcaagtgatcctcccaccttggccacccaaagtgctgggattacaggtgtgagccactgcacctggcccaggaatgaatcttattattttatatatatttactaattaacagttggggaatgcgggaatctcagtgaaaactcccagaatgttttgttaactagaccagtattttccaatgtgatwaggtaacagagtttatgagatgatcatgaatgaatatggttggttttattggcagaagggatgctttgtgtatttttttattttgatagagtttgatgtgcacgtattagaaaacttcttaactgatttggagaaaacgtatttcttttctgttgaaaggtgaagtggatcctaaagagaggatagcacgccaacgaaaattattacagaagaaacttggccttaatatgggagaagcaattggaatgagtactgaagaacttttcaatgatgaggatttggattataccccaacttcagcatcctttgttaacaaacaacctgtaggtaaaacgtttggttatttgattgcaagtaataatacaaagggtttgcttcattttgtttatgtaattatagtttaagaaaatgttatacttagctctgttcattgctgcttagtgccaccataatttagcatctttttttaactggatttctgatgacagattctatagagttagaagctcaacctacctcccagacactggactgttaagttgtagtagaccttttaggcactactggtattgaaagattctaattgctgcaattgctctttttttggtatgttctttgatgtagggaaaagtaattttttgggagagtgagagatagtaagggctattatagtcagatatgatagtagaagtgtttagtgttatgatttattcttttttttttaagtgagaaataagacaaccgagaaagggtatataatatgaagtaaaaggaagttttttgccaacaggacacagacatttccatgccccatagacaaccattttcaagttacttgtgcatcatttctgaaacttgtgtgtaccaagtgcatgtgtttgtgtgtgtgtatatatgtatatgtgtgtgtgtgtgtttgtgtgtgtgtgtgtgtgtgtatatatatattccttttaagccatgtttaccttttctcacttcatacagcttaatgtgtcagtatattcagattgaccgcattctttttggacagcttcatgctgttttgttttgtggctgtaccataatttcactcttttcttcctcttcctctattccagttcccagtggatacatttgtgcttcttaactttttttatgccacagactcttttgaagctctagtaaaagctgtggctctcttcggaaaaatgcacatatgagatattacatctcaagcggttcagtactcttttacctgacccccagtattcttttaggggtccatgggctgcattaacaattcctgctttgcaattatgaatctcctgtcttgtcattcccctggtcttttcctttgcttcagtggagaatggttctatttgcctttatacgaatggcactttaaaccattagaatttgtaaagtgtattttttagggttgggggtgtgagtgatgatgagtaacttctgcagacaagggggtagaaaggcagatactaggagagaaaaaagagagagtatgaagaggccagaatacagcaacaccctgaaaggaacagaaggaaatggggtagaaaggaaagtgtaagatgtaactagaagataaagaggataatagaataaaaatgcaataatatgatcacagtatgggtaattgaacatggtgtaagaaaatgaatgggcaggtgtattagaaagtgggctatacagatcagattaattgggtgcgggataggcaacactaatttggggtttgcaaaatccagatttatatatcatggacctttgggggaagttgcttgaggttcatcgttgccataggtcattacagctgcattgcttatatatgtgcccatggttcttgatcaagactgcagcagaacatccacaccagtgaccttaactgtttgtggaagtataaatttcagttgaatcttttggttaggcacagaagggatttttaggcttgagcttaaaaatctaacgcacagactttatagtgtcttctgtgaatggaaaagagcaaaaagagtagacagtaagtagttaagaggaaaggggcatatgagctaagttggactatagcatgctggaccaatcacttaaggctataatttatttatttatttttttcagcagatggtgatgatcagtttcttctattgacatttattctcataactttttggtgatattatttttattttgaagtcttacctcttcaaggccttctctatgggttaggatcatacatttgtgcctcataatgtagcataaaaaaagttaagaagcatatgtgtatctgttgggagttggaataacagagaaaagggaggaaaagactgaaattatggtacagtcatacaacaaaagagtgtgarcctgtcaaaaaagaatgtgatcgatgtatatatactgaaatktatagacttggtcttcttctgaggctgagactataggtacttattttaatttcaaaagttccaactcagcattcttttattcttttagactcttcaggcagctgaattgattgactcagagtttcgagcaggaatgagcaatagacaaaagaacaaagctaaaagaatggccaagttatttgcaaaacagagatccagggatgcagtggaaactaatgagaagaggtagtaatctttttttgcctattcacttaaaacaagagggctctgtggctttaatctgtgtctgcttgatttatagaaacattctgctgacatatttagctggggagtactgtttggattctcttackcaattgtcagagagtattcattgtactaggaactgagaccacttccccrgaaaaatccacatgtacagacttttttcctactaattatcagttttgaatgagggctgaggatctccaaaggggagagcattccaggcagaagaaacaagtttaaatgccttaaacatggaataatcaagaaacaaatagaagggcagtatggccttctatactgggatgagtgcacaggagagtgatagagaatgaaatcagagaggtgtctaaggaccacaagttaagaatactcccttagtaaagtgggaggtattgtcacgatattacctcacctgtgccttaagctggggctatgctaaatagccaatgataatctaggctagtttatgtagtcctgttgaagaaaagaactgtgtgggtaaagtcactgtcctctgtttcttcataagttactaaaagtgatcatctatgcatggcttggagcagcatttctcaaagggtggttcaaaactatttccttcaggtgctcttcgaggaccttgtaaaaaaaaaatgctgttttttttttgtttgtttttgtttttatgatgcagtctctgtcgcccaggctggagtgcagtggctcgatcgtagctcactacagcctcaaactcccaggctcaagcaatcctcctgcctcagcctcccaagtagctgggactacaggtgtgaaccaccatgtgtggctaatttttaaattttttgtagacataaggtcttcctatgttgcctaggctggtctctaactccttggctcaagtggtcctccttcctcggcctcccaaagtgtcgggattataggcttgagccatcacacctggccaaaaatgtatattcttgggtcccactcagatctgttaaataagaatctttagtggtgctcaggaaatgtttgcataaatgctgaattaataaaaagcctcggaaaataggatttgcaaatgacagaactttttgttatatgtattcacataaagctaaaaagtgtttagtgtttaaaagctaggcacaaagggggataaataataaacatatacttggtagaaatttatacttgagggtaaatctttaactgcaaactttttattcagcttgttaatgacaagattttttaaaagttaacagctcattaagatcatatagtaacctaataagtttttctactggtttttattcatacaagcacttttagccaaagatttgaatgttggaaatattcgactttatttttcagagttcatgagtcattcacaaacatttattaaataccttctatttgccaggtattgttctaggccctgaggacatgtgtgaataaaatagagaagaattcctgccttcggaggttatagtctggagggaaagaaagatgggaaataaataagtaaaatacagtgtgtgtgtatatatgtgtgtatatatataaaatacagataatgttaagcgttaaggaaaagaagataaaacagggaaggaacatgtgaaatatttttggggtatagagtttgaaattttagataggaaggtctaggagggcttcctagaggtgacttttgagtaacaatctgaaagaaatgagagtgctagtcctgtgaatatctaggaaaagtttcaatagttttaaatagtttaagaaaatgttatgctttccaaatagagggaattacaaggacaaatgcctgcaaggggaaacatgcctaacaagttcagggacttaaggtgacctactaatgtggctagatgtggagataattaagggaagagtaataggaaatgagagggaggctcagatttcttttatcaccttatagaaaaaatggttggccaaataaatttcactattaagatggagagaggggagaagtatttatagaaaataatgctgtatatgctttaaaatgtgctaagtttttcttttctaaatgctgaatgaaagtagtttgacttgtcctctcctttccagtattaggctagcctcaaaatttttggtctttaagtcataatagaacatttcctcaaattttctatatccttttttcattggtcaattgtttatctccatatttttcaagaactggtaagattatactgtattgctcagtatattagttttctctagtatataaaagcctaaaaacgttagtgttatgctggaccagatgcaggttatatgcaggttataaaaaagatgatgagctgattgtagagaggagggaaaaatggcctattaaattcaagatccaatttgaaaaaaagaattcaccaacctatagtgtagttagaatatattttgctcaaaaaattttaagcagttagtcgtttgatacatgggattttaagtaaatcatataagcagaatatggtgtaaaacatttgtttaaatgatggattatcttaaattcattgtgattcacattatcttttattcatttcattcattgtggttcacattacgctttattcattttctaaatggtgacttttattttttagcaatgatagcactgatggggagccagaagaaaagagacggaaaatagcaaatgttgttattaatcagtctgcaaatgattccaaagtcttgattgataatattccagacagctcttccttaattgaagaggtactcttgaaagactctaaagtatccattaaaattgcttataatctttgggccagcagcggtggctcactcctgtaatcccagcactttgggaggtcgaggcgggcgttatcacgaggtcaggagcttgagaccagcctggccaacatggtgaaaccctgtctctactaaagatataaaaaattagccagacgtggtggcacgtgcctgtaatcccagctacttgggaggctgaggtaggagaatcgcttgaacccgggaggccgaggttgcagtgacttgagattgcaccaccgcactctagcctggcctacagggcgagtctctgtctcaaaaaaaaaaaattgcttataaatctttttcaaactagtatatcattgaaagtattgaataatctattgagagaaattttatcagtaaaaatatatcttaattagttaaaaaaattaaatttttaaaagcctgattgctactactagacctacaaataaaatttattaagttacttaaattgttagcataaaatagaccttttgaactagtagtaattctgtttttcttattcagacaaatgaatggcctttggaaagcttttgtgaagaactttgcaatgacctttttaatccctcctgggaggtaagatttcttcattacagtttttctcagctctattttctgtgctaatgaagggaacaatgtcaagagcaatatactttgtcagagtccctattcttctctgtttgtctcaggactcagggcacgtcatatcattgacctaaatagaaaactataaattgattttcacctttcatatccttcagtcatattctttagtgaattgtttatttcttttcgttctttaaattataatccaaaggcttgcatatctctcccaggcagtaaaaaaaatacttcctttcctttggaagtggacaattttgattgatcaagagcagtagtttccaagccagctttttagcctcagaaatctttagagaacatcttgaacagttcccaatgtgtagaagagaagagtgaagttcctctgcttgaagttgaggattggtagtttcaaaccattgtttctcccttctgttggcctctgtgtaatttaaaaaacatttatttagaataccttttagttgcctttccttggtgtaattctatttaaagttactcaagtcataactcatggggtgttaagaagtgggcacagtgtcaatagcttgttcttttcctttcctgatgacactgcagaaagtagcctcaccttctcacagaaaggtgatttatccccaggggtatagtgatgcattaatcataagacattttatttgtattgtcttcttttggcactcacttatcattggtagctttggagcttaggtttttcactttttgatttttttgagatggagtctcactctgtctcccaggctgaagtgcagtggcacgatcttgactctctgcaacctccgccacccaggttcaggcgattctcctggcttagcctcctgagtagctgggactacaggtgcgtgccaccacacccggctacttttaaaaatatttttattagagatggggcttcatcattttggccaggctggtcttgcttgaactcctgagctcaagtgatctgcccacctgggccttccaaagtgctgggattacaagtgtgagccacctcgcccagcctggagcttagttttgatgcacatattttgaaaatacatgtgttgggattataaagaacaccttgggctgggcgtggtggctcatgcctgtaatcctagcactttgggaggctgaggcggacagatcgcttcaggtcaggagtttgagaccagcctggccaacatggagaaaccctgtctctactaaaaatagaaaaactagccgggcgtggtggcgggcgcctgaaatcccagctacttggggggcttgaggcaggagaatcgcttgaacccgggaggcggaggttgcggtgagccaagattgcaccactgccctcaagcctgggcaacagagtgagactccatctcaaaaaacaaacaaacaaacaaaaacactatacgatactttctttcctctctcttgctgtggatagtgctgaatgaaggtagaggataagggagtgaaagcaatgtggatttatatctcaaraggattttagaatagctgttttcttgcttgatttttaaaaaattccatataaccaaaagcagtctgaaatgtatatgtgtaattcttcttagatagttgaagaaaaatacattcttgtaaagttccacttagtttattctaatttcttaaaaatccagtatccctatttcgtatagaagaaaaatcaaactttgtttcttaaacrtttaacatctgacatttgcttctttgttcttttcaggttcgacatggtgcaggcactggacttagggaaattcttaaagctcatgggaaaagtggtggtaaaatgggtgacagcactttagaagaggtaagtgtattaatgcaacaattatcaccaagtattaatagttggcatctttttccaatgtagggaagtaacgagtatgtgccgtgaagtaggaatgagaggtaaataagaggaagagatatgaaaaggtaaatatcatacaatggattgaaaagtagagtaagatgaataagagtctagttgagaggtcagtgagcaacataattggtattgcctggagacactggtaatagtataaataatagatatatgaccggtgtgcttgatatgagaacaaccttaagtaattagtttcttaatttctcttggagtgcgagtaacataatacaatccatgaattttaagaattgtgatatagtatatctgaattgaattaatgatcaaaggggatatgagatatgtttaatattaaagacattaattgggactattctactttttggttgttgttcctacagctaaaatctgtccccattttttatttttgattttggacctaaggtgtcccccaagtccccagtacaaagtatgatctttgtttttaaaaaaattatgttaaaaaaatgtgtgtgtgtgtgtgtgtgtrtrtrtatatatatatatatatatawtatyttttaacagatgattcagcagcatcaagagtggttggaagacttggttattagactcctttgtgtttttgcattagacagatttggagactttgtttctgatgaagtaagtatcatttaagggaggctttgcccaatcaaatttcaaattctacaaaatacgttttttgcaaatatgagttttcttcctttttcgtctgtaggttgtggcaccagttcgtgaaacttgtgctcaaacattaggtgtggttttaaaacacatgaacgaaacaggagttcataagactgtggatgtgctgctaaaattacttacacaagaacaatgggaagttagacatggtggtctgctgggaataaaatatgctttggcagtccgtcaggtaaatatttcaagttttgaagcttatgtgggagagttttttcccccttatagtttattttcactaattagacgaaatggccgtagattcttactgttacagagaagccagtcttccaagatttgccgtcttgagagagtgtcatagagataggtggcgctcataagaatttaagtataaatcaaaagatggttagttacattgtttgctctttaagttcaaagattatttttcctttttaatccattgctacagttaattcagtgctcttcatgatttggttttactgttttaactcatttaaatattgaatacatgctctgagggctatacaacatggtgccaagttatgcagtatacatacaggagtagacatcaaagtgtaaagcagacaatctgtatggtcatgtactttttacataaactgtcagtgttttttttttttttttaatcctttatgacaaagcttagaagaagaaaatgcatgtagtcttattattttcatatagggaaataagttctgaaaaattagatgccttgctgatggtcacaaaactagttaaggttagttagtactagaactagaaactaaatggcatgtcttatagaacagtgtttagtgtaatgttatacatcatctaggatgaaaatacctgcatatgcagatagtcccctactcaggaacatttatgttcccttagtgggttattaaaaactctgatatattctggctaggacttcagttcttagattggcccacaaaagcctatttcatatataaatatatctaaagtcctttactaaactaataagtgctgtgtaatctatatatacacataatatttttgtggaaaaattgattctgatttccaatatgagatgccagtaaaacatctcttttctccttctccctgcttctccaccatagatctagtgacagaattagggacttccacaaatagttgtcttgactctgaacataatgggtcagcaaagagtgagtattgacgaaaaagaagagacgtggaagtaaaggagagattatgaatgaggagctagagagagaccaggaccttttcttaccagtttaatttccmgtaatactttccagttrggatcagcattgtcagggtgttaggcattggcctatataggcatttcactatccattatggctacttaatgctttgtgccagcttttcttctcttcccatgctcactgtataacagattggaacctccctttctgtctcaaaaagcaagctcaaaggccttttgaagttttctaagattgtcttttttttttttccyttctttaactgccaataacaaagcattcgtgattctgctgagagacctgaactctctgtccaactcttttctccctctgctcccttccttgcttttcctgccccttttagtgctcttctccccttggcagccaccctcttacccccataaacaaaacctttttttctgtgttctgcactctagcctctgtagataacagtagacttatatggaaatggaaagcaccttatttgtttttgaaatattatccctatttcgtagtgaaaccagttctcagtgagattcctagtatatgatcacaggagtaatgtctggggcctggtctgttgggggaaatgaaaagacattaaattggaataatgagaagtgggaaggtatggcttttctttcactcttctctcattttccttttggttgtcagtggcattgaatgagatatggaggctaggattctggcagaggggtttgtgtgtgtgtgtattcacacagagaattcatagtcttacgtataaaacatgttttgatgttttatgtctcattgaataaagtacttgatgcccttgtctttttcaaatgggattacttaggcttctattgatgttacatttttgtttatgtgattgttttttagtaggtacagtcataatgatgtttcagtcaatgatgggccacatatatgatggtggtcccataagattataatactgtactttgattgtaccttttctgtatttaaatataccaatatttatcattttgttagtagctgcctatggtattcagttcagtaacatgctgtgcaggtttgtagcctagaagcaataggctgtgtcacacacatagttaggcgtggtataggctatactgtttaggtttgtgtaagtacactctataatgttcacagaatgacagaattgcctgatgtatttctcagaatgtatccattgttaagcagtgcatgactataaatattggratttagctgtcatgtggcaaatttaaattttaaaatgtttaagcacagtaactgtagaatagaaaattaatttattttcatgtactgttttacaggatgtaattaatactttattgcctaaagttttaactagaataattgaaggactccaggatcttgatgatgatgtcagagctgttgctgcagcatcattagtgcctgtagtagaaagccttgtctatcttcagacacaaaaggtaaattaaatatttttacagtttcttactatagagcttgttttcatttgggatatggagtattagaaaatacattgtgtacatttttctccttcatcttcaatttttttttttaacaacagccctctgatgcatgcaatcttgattatatattgtactttggaagagtgaattggatccatttgtctactttcccttcatgtacataatatatagggaacttccttgagaagaatgcagccatttcttcctaattttactcctggtttttagatatattggatttttgtttgttttgattttagtttttggattttttttttaaatctagtctcccctcccctccctgtctctcctctcctcctctcattattaattattaattagtattaattattaactaataagtgctgtgtaatctatatatacacataacattttctttcttttcttgggtctcactctgtcacccaggccagagtgcagtggatgacatgtagccccactctcctgggctcaagcagtccttcctgcctcagcctcctaagtagctgggactacagacacatgccactgtgccttggctgattttttaaaaggcatggtggcgggcgcctgtagtcccagctactcaggaggctgaggtaggagaatggcgtgaacccgggaggcagagcttgcagtgagccaagatcgcgccactgcactccagcctggacgacagagcgagactccgtctcaaaaaaaaaaaaaaaaaaattattttttgtagtgatgggggagtccccctatgttgccgaggctggtctcaaactcctaagctcaagagatcttcccagtcttggccttccagagtgctggggttactggtgtgactcatcacacccacccctctagtctcattttttgaaatgacttttttaaagatctggctgactttccaccttattatcaaaatcagaacacaaagttagaagtacagtaagcagtattttaagagcttaaaaactaaattttttttatgatgagtagtaccattttaaatgcagtaaaattacatagaagaacatgtcttgtgtctcgatgctctgttgttttcactgttaagttttttacataaaatagttgtggctcttttattttctgaattctacccattatgagtctggtcaggcagggaagtatcaaagtagagttgaatggcattaaaaagaaggaatagagaattgttaaaggcaaatagtgtgacctccttaactttactcaaaattgacaccgtccaaggtcattggaattgcatgtgttgttgaatcagtagtgacccctgggataccatttggcagggtttgtgagtattttgtgcaaaattgataacttttcttgaaaactgatcttataggtgcccttcattataaatacattgtgggatgctcttctggaattagatgatctaacagcttcaacaaatagtattatgactctcctttcatccttgttaacttaccctcaggtccaacaatgcaggtaattatttctaattagtggaataaagtaaaaagtctttacatacctttcgagataattcagcctaaacataacaatattttagcacctttaagaataatattatttaagctggagatgccaaagactaccgttttcagaaggccttgtcttttttactctagccattcgggcagcagcttacaaagatcattttttttttacccttgagatatttcagttatataattcatcgtcttgttcgtcttataattgtttacttagaaatataatcattgaatagtatttccagttctagtcctagaacgtagaattttagctttatttagtaacatttagttaacagaattatcatcgaacatcagctttaaattttctaaaacttgcccctctgtgaactttttttttgtaatgttcatgtcttcaactcttgttcttgatttcagtaattacttatcatgaaggaaatacataataatgtaatataatgtccaaaggcagagatcaagtgaagccaaaaacatacatcaaaaatttagtgtcaccaattttcctgtcctgatatatgaatctcagctcagcgaattaacatattccctaccttttagactggcccttgaatattgttasagataagtgtccttagagatagagaatagtgtccttagagacagagaagaaaaarttattatgcaactttaaaaaattcacagatgagaaaattactcttcttgtcctagtgagggcgttcagtgaatgttcatataaatgcttatatgtggtttctggctctatgagtatttcccatgaaacccatagatgtataaaaaaagtagaaaatatttcaaataatactgacctactggaagtactttaatgctaagtttagattagttggatagcctataagtaggaatagcaaaataagtgcctataaaagcaaaagaagagaaaaattgaagtggtagtacatttatggggtttcctaatttttgatgtttctattactaatgaaagctgtacaaactaaatgagttaatctatgtgaaagccctctttaagctgcaagatgaaggggtttttcattactgtaaatcaaggattggtaatctttttctgcaaaggcccaaatagtgagtatttttgttttgtgagccagtctgtctgtcaaaactactaagctgtcactgtagtgtgaaaacagctgtacatgggtaatacataagagaatgaacgtgcctgtgtacacataaaacttctacttaaaaaaaaatgggtggaatggatttggcctatgggccttagtggatggtgtcagaaaaactggataatataaaaaagaatatagtgaaaattctattaattcaatgtgaaataatgtagttttccgtcttttttgtttcaaatttgcttcatatattgtgatacttggcagatactttcttctagtttatgtaagaagaaatgtagcatgttatttggagcatgaacagttagacatttaacaagactttgttataatgcttttatgtgttttgtgtcttttttatgtctatgtgtacctgtgtttaagttagaattttataaataaatttgctaaatatgaaaataaatacaagaaggtagtgttcatacaaacctgcaagtaatgaaaatagtgttaaaagataggcctcctgggaggaaccacaaaagaccaaatacagtggcatattattttttgcttatgtctttttctgtggagccatatatttcaaatgctgcttatgaattatttcctagttccaggtaacttttacaaatgacttacgaatgtgacaggaatcctgtggcccaagttagtctagacttggctttgtttgcttccccatttaaaacttaatctatgagaaggaagaaatttgagttttcctaacttagtaatgctacaccaggataataaatgtcaaagttgctaccataccaccacttgctcatttgatatgtgacagagatggcmccaaagggagatggaaattatgtgtatctacccgttggggttagccatggggaagaagtaaggattagcaatcctgatcatgtaggctgactaccagctaggatacatgtcccattttcctaagaacaattayattggaaagtcctaacttgataaaggtgactcatagcattagtgccatagaagaacctgatgttagtatttctacccttctttttgactgcatttgctctggctcttctgttgctacgataacagttgtgaatgacattgttacatgaatgttcatatgaaaactgtattatcttttaagaatttattcatcaaaaaagtcacatggtgtcagcatcactagatcccatgagaatatttagataatgtatctacagagttacaacttagaataagtaagattaatttgtgtcttctttattagtattcagcagtcactgacagttttagttccacgtgtctggccttttttgcatcacactatatcatcagttcgaagagcagcattggaaactctgtttacgttattatcaacacaggaccaggtaagaactgataactatagcagtcttgaaacttatataaattaattttatmaaataaacctggtctttagcttacccttgctgtatatccaaagatcaggacaatgttgggcctagtggtatggtaaccatgtagatgaatataatcactgtaagagcagaaatattttaatattttgttctagattgtattctcaccacttgaaatcatgcttaacacataggaagtcctcagtaaatgtttgttgaatgagtgattgattgaatagtctcttcctgtcagagacctgttatatagtctttgcatgctctttgtctgtgtggctgacagttgggtggctggcagaacccatggcccaggtgagaaggctacatttgaaggtctagagtacaactcttaaaagacttaccaaggaattcccaggctcttgcctttatttaaagatttttcaatcttaagagcatgctattttcaaggatagtatacttcaggagtcacgttgaaatgtctacagagatcattcagataatatcagtgtgtaaatggagcctgtggtaagcttaggagtccttgccctgtttataaaaggcttcacattcccatttttaaaataaccttataggtcaaacaaagtacctagatttaggggattatcaataagaaatttagttttctagtgtgcagttaataggtactacagtttgggccaatcattttttaaaaatagtgactaagtagtgaataagtgcctcttttgtgttcactaactggattctcatgtgaattaggaacattttgtgtagacttgccttagtgtgcagcatgatactctgttgaacttctgtaaataaacatctgtaaattttgtttggcattatcattttgattttgtctgatccaaatctctgagaacaactgtcaggtttgttttacagttctcagttgatcaagcatgggctgatatgacagctggcatgggttgttcttaattttcatttcatttttgctttatttttatgctttttgcctaaatgtttgtgaattcttaaattcattttatgtagaacctttgaagttaccaaattttttatcttcatatcgttctttttgtatatatggactttatttttaatagcagttttagatttacagaaaaaatgaaggaaaagtacagaaagttcctgaatacccttttatccctcctactacccacacatagttccccttattgttaacatcttgcattagtgtggtacatttattaaaactgatgagccaatattgatacattaaagtccacactttacagtagggttcgttcactcttctgtacattttgtacatattgtacatttacaaatgtacaataatatgtacccaccattacagtatcatacagagtagtttaactatccccaaaatcccctgtgttccacctattcatccttccttccctgtccctcaacccttaacagccactgatctttcttactgtctccttaattttgtcttttccaaaatatcacatagtggaatcatatagtatgctgccttttcaaattggcttctttcacttagcaatatgaaattaaggtttctccatgtcttttcatgtcatggtagcccatttctttttatcacggaatgatactccattgtctgtaccagtttattcatttgccttctaaggacatcttaattgcttccagtttttggcaattatgaataaaattgttacaaacattcacgtgcaggttcttatgtgggcattaagttttcaactcacttgagtaaataccaaggagcgtatctgctgaattgtatggtaagggtatgttgacttttgtaagaaactgccaactgtcttccaagtggctgtaccattttgtgtttctaccagcaatgagtgagggttcctattgctttacattctggccagcattttttgtcagtgttttgggttttagccattcttataagtgtgtagtagtatttcattgttgttttaatttgcagtttcctagtgatacatgatgttaagcatcttttcatatgtttattcgccatctacctctcatcttcggtgaggtgtctgttcagcttttgcctatttttatttatttattttatttttgagacaaggtctcacactgttgcatgggtgtgatcatagcttactgcaatcctgaactcgtgggctcaagtgatcttcccatttcagcctcctgagtagctgagactacaagcacgcaccaccatgtctggctaattaaaaaaaaaaattttttttttttttttttgttagagatgaggtcttgctaggttacccaagctagtcttttgcctattttaatattgggttgttttcttattgttgaattttaagagttctttgtatattttagatacagtttcatattgttttttaaagcccttttattccttattaggtgatcaagccacctgcaggctatttttaacttgtgactttattattagtaataccaactttacattactagaaaataaggtattctgtataaatgaaattttcaaataactgaaatatactttttttgccacaaaaaaaaagttagctattaaaatgactgccacagtagatcatcattttaaagtatattaaacataagctaacttttttttggtgagtcagtcaccaatattatttgttggttattagtttttatactgtttattatagcatactgtgggaatattgagatacatgagtcactgtttgcagtaattgaactgttctttttcggtttgctgttgcctaatttttatctcctctctgcygtcaattgtgatttctcacttttgttagtcttgtaatacctcctcccttgttctaaaatttttgctataaataagatcccaagattgttataaatccccgtcgggcccagcgtggtggctcaggcctgtgatcccagcactttgggaggctgaggcgggcggatcacttcaggccaggagttccagaccaacgtgggcaacatggtgaaaccctgtctctactaaaaataccaaaattagctgggcatgatggtgtctgcctgtaatcgtagctactcgggaggctgaggcacaagaattgcttgaacctgggaggcagaggctgcagtgagccgagattgcaccactgccaagcctggataacagagcaagaccctgtctcagaaaaaaaaaaaaattcgccttccaatttttagtccctcaatgattatggatattggcttttaaaatttcctggttgtgaaaacatctctgtgttctttgatgttgattttcttgtccagggatttttttttttttccttttgaatttgcccttgctggctcataaatgaaggctttggtactagccttcatttctttatcatttaatatgactctttatcatttcctataccagaatgccattgtctttgtatgtaatttgtggcatgtyagccacctyttaagcatgggccctcaatgtttgttaagtaaattagtgtgagattctgtgctgggtttyctgggaaataaaaaaaagaaatcctgtgtattagccttttttcacactcctgataaagacatacctgagactgggcaatttacaaaagaaagaggtttaattggacttagttccacatggttggggaagcctcacaatcatggtggaaggcaaggaggagcaagtcacgtccatgtggatggcagcaggcaaagacagagcttgtgcagggaaactcctgtttttaaaattgtcagatcttgtaagaattattcgctgtcatgagaacagcacaggaaagacccactccgtgattcacttatctcccactgggtccctataacaacacatgggaattatgggagctacaagatgagatttggatggggacacagagccaaaccatatcatcctacatgtttcttaccttggaaaagtttacagtatggttgctwtaagactattatattacatggtaagtttaataacctctacaaagagttaaataacagaagaccagtatgtgagagatgtcagacagcagcattaaaagayaaactaagctgaaagatcaggaagattaggtgatgtggttaaaaaaactagtattccctcacttctttttgattcatatttagtatctttgatatgtactttcacagacgttttactgaatatgtcaatttcaagttagacaagcatacagaatgtgttttgaacaaaagtgcttttctagtctgttccctttagacttttaaaacattctgcttccatatttttcttccagttattctgacatgtttgtggtccttttttgttggagtcttaatgtttattgtgtttcctgtatccttttgtgttgattatgcttttagcttctttttctattatttttcataacttttcaatggcatcattcatgaaatttcacttgtgtttagcctttatcttcagcgtatctctttactgaaagagatgctgtctgtgaaacttaatattggtgcttccagattttgtgctttgtcactgccctgatccttgctgtttattatcttcaccaccaaagactatggctatggcactaatcactgattcttagcagtctctgattttggtccccacatacatgctttactatttttattggctatttcattctgtgttttcaaataatggtataaagccaaactttttttttttttttttttgagatggagttttgctcttgttgcccaggctggagtgcaacggcatgatcttggctccctgcaaccgctgcctcccgggttcaaacgatttccttcctcagcctcctgagtagctgggattacaggcatgcgccaccacgcctggctaatttttgtatttttagtagagacagggtttcgccatgttggtcaggctagtcttgaactcctgacctcaggtgatccacctgtctcggcctcccaaagtgctgggattacaggcatgagccaccgtgcccagcccaaagccaaacctttcaggaagcttttcttaatactaccacctatttcctttttttaaattttgggattttttttttaatggagaaargagcagggaattgtatgaaacagcattcatttatgtttacaccatccataattgacatttcttataattttgtcttgtttcaagtttttgtcataaaaaatttaagttataatcctatcttctaatttacctacttctgccttctgtgtattcataaaaattatcatcctttctccagtatgctccttaaagtttggaattttcgtttctacatggtcatagcatttctaaaaggaaagaatttaagtttcagaaggatttgggggaccatagcctcagttactcacaaactggttagtaatttgtaatcgcctaccactatattagaattaaattcctgtctttcttggttttctaatacttggctcttgtcaacattttcccctaatatttcctaatgtatactctggagtcaagaacattttctaaatccactcctgtatcctaagtgtaatcatgttcatttgaccaaagtatctttggacatggctccttgctccctgctcccctacccccactccctcccactctcaccttcctaaattttagctccgtttcttcctctctgtaccttttctctcatgagacaaatcaaatctctagtgcgacaaagcatttccaacttctgtaacttgttttatctaaatcattgtttaaagtcgtcattaygcaatgaaaactcatttaatttttattgttaatcttgtgatcccattatttgctttctgaaaagctgtacgaataaaccatctctgatgcttttatctgttattgtattcctctccacaaattgcctgaaagttacttattgattaatttatagctgtgtgcaaactctttgtggtgcagttccatgattcctttcctgcaactttgaaagccaaagcttattgtgaattgggtcaatttataaaactactaatttggtggcaaaacctgaccattctgaagagaaactgtttagtctttatcccacttaatgtgcctattcacacattttgctgcagaaatattaatatattttattcaggtgctactggtattgtattggagatattatataatatacactgtatacaattcattattctaaaatttgaaaaatttctgagtttcaaaacacwtctggctccagggaatttggatgaaagatcattgacctattgtgataataaaaatccactctcacttttaatttgtgttcctttttctgagctgcttccttgcctttgatttcttagtgttgttaagtattcctaattagtcagcaatcctttatggaagcaatcataatgtaaagagccgttaaatagagctttttatcactgttgttaccccttcaatggtaaaatgaaaagatcccttaaatagacaggatctgagttctaactttggctctatcatttgctaatttatgacctttgtcagatttgtctaaccctctctggtgattatctctagcctctgtcagagttacatggatcaagtgagataatgtgtatgaaagtgctttgaaaatgttaatgctatacaagtataaataatagtacagatactaaaagaataattagtagttccattctgagcattctttccttattctggggtataggaatgatatttaattgtgataataataatctaagctgttgagggcttactttatgctaggaactgtgctaagcagtttacatgaggtggctactgccattcctgttttgcagatgagagaactgataatcaaagattaagaaactttcccggccgggcgcggtggctcacgcctgtaatcccagcactttgggaggccgaggcgggcggatcacgaggtcaggagatcgagaccatcccggctaaaacggtgaaaccccgtctctactaaaaatacaaaaaattagccgggcgtagtggcgggcgcctgtagtcccagctacttgggaggctgaggcaggagaatggcgtgaacccgggaggcggagcttgcagtgagctgagatcccgccactgcactccagcctgggcgacagagcgagactccgtctcaaaaaaaaaaaaaaaaaaaaagaaactttcccaagctcatataagcagctcacttcagtttcagatcttattctggctttcagcttttaactaaattttatacggggacaaaataattatgtgtctaattgctttcccacttctgcttatggagtcattttaactacaaagtgagaaaaggaaactcacctgaattactagtagctgtgtcctggtttcagtttctaacttctcaagctatacctcaataattctaaagtaatttttcarggtcagacttggctatagctcagtgtgtcactgcgttgtaaagattgatgcttctgtttccttgaaattatcctggttatctttagtaattttttggttttgttttgctttgtaaaatcagtagattttataagggagatgtccttatttttaaaaggtatccattataagtatgtgtgctggcatgcacatctctaaaatgtccttaaataaaactacagttaatgcagttgtctctgaaacattatttcctttatacttccctgtggcataccatggcatttgtgaaaatatattgtttaatcagtgtgccttcttctgtgatgttaacatgtgaaagaattggcaagcttggcatcttgaggagcatgaagtaggtactcttaagaaaaaccatggccaggcacagtggctcactcctgtaaycccaggactttgggaggccagtgcaggcagatcacttgaggtcaggagtttgagaccagcctggctgacacagtgaaaccctgtctttactaaaaatacaaaaattagccaggagtcgtggtgggtgcctgtcatccctgctattcgggaggttgagacaggagaatcacttgagcccgggaggcagaggttgcaatgagccgagagattgcaccactgcactccagcctaggtgacagagtgaaactccgtctcaaaaacaaaaaacaactagttttatttcataatgatttacaatcaaggtataacttttttttgctaaactagcagcttggtaatcaaagtgaaggaatttaccatttgtttgtcctttctatattgtctctttagccagtgtgtttgtacgtgctagagtacacctattaatatatatatctatcagtgaactactgaaatatccagattaactagtgttagtaactggtaactgttgttgccagacaaactcctagacatgaatctcctattttgccttctttactgactgggtcaacttttccattccattgcatctcagtcactttgtgagtcattccaaaatttcagttaccaatacattaacttttgtttgaaaggcaagcttagttattacatgaagatatacatgagattgagttggaatctgaagcataatttcgaatgttagaaaatttaacatacacaaataagtaggaaacaaagaccaaaagaatagcctgaactaagactttggccttagagaatgctagcatatttgggtattgccagattttataaaaatatgaaaaggagagagcaaagttgaaatatttagctgaccttcaataaatgttggttggagaaatgaatagaacaaggcattataaactgtctgatatggaaattttcttttcctttggctgtggatcacaatagggtttcagagcaaattagtaaaattagtgaaagaacccagtgtgattcatcaccaacttasaggttctctcctgatcttcttccctgcagtctgagagcatttgatatgctggtagaaatgatgaattggcctgcaggcaagaatcaggtgtttgtggtaatgctcagattgctccttttttctgagtgtacccattttgtgggaagataaaagagggaccgtaacaaaagggtacagacaagatcttatcccacctgagatgccaaatctgccagttagggatctatggctgagccatttttacaatacaacattcctgacaccaaacgtgtgggttttttccttacaccaaccaattatccaactccctggttgccaacttggtatcatacaattcagttcagttctgacagtctacctggaattagtgtcagctcccacaagttagagagctcagtcgcacaacagatagcagttgcaagtgttggaccttccgtacttctgacctaccatctgtaaactgggttcccctgaccctctcctcaggtttgataacttgttagaatgcttcacagaactcagaaaggctgttaaactggtaattacaattgccggttttctataaaggacacaacttaggaacagccagatggaaggagatgcacaaggcaaggtatggggatgaggtacgtggagcttccatgtcttctttaggcatgccaccctcagcacctctgtgcactcaccaacccataaacccataaatgtaggtgttttatggagactctattatgtagtcatgattgattgaattattagccattagtgaggtgattaacttaatctccaacccctctagctctggaggtggggagcaggaggcagtctgaaattttttagccctctaatcacatagttagttcctctggcaaccagcccccttctgaagctatcttggggcctcccaagagtcacttcgttagcacaaactagattrtggttatgaataatccctatcactcaggaagttctttgggttttaggagctctgtgccaggagctggggatgaagatcaaatacgtttctttttaagaccctggacaaaatgctgaaaaaaaatttcttatattacagtatcacaattttgggaaattttgcatattggcaactattccttacgatacgaatttggattatttccagtggccaggatggatttcaacaactatttaagtgcctgctatgggctcgaacaattttctagatagtggtaagagacaaggcctttgctctcctgtagtgcttaaaataggagactagacaggagaagacaaataattaaacaagaataacttaatgaggtaactctgatatgggaggtagaagacactattggatcctaaatgagatgggtgatggacagggaaggcatcatgttagaagtgaagtttaagctgaaacctgaagggtaagtggaatttagccaggggaaaataagggtaagagtcagaggagggaatagtatgtgtaactctggaggcaggagagagcagaatggcactaaataagtgacaggaagttggtttggtggagggcaacatggaaggggggtatagatagttagaagtttaaccttcattttcaggtacagtgaaatgtccatagtcttatttctgtttgtcatcaactctccttattctgagtctccggaaggcagatcagaggaagaaacgccatttccatagttttgccttttccagaatgtcatatagttggaatcatatagtatggagccttttcagattggcttttttcacttagtaatatgcatttaagatttctctgtgtcttttcatgacttgatagttcattttctttttagtgaataatactccattgtctagttgtaccagtttgtttatccattcacctaccgaagacatcttgcctgcttccaagttttggcagttatgaataaagctgctataaacatcttgtgcagatttttgtgtggacttttttgcctcctttgggtaatatcaagaagcacaattgctggatggtaagagtatttttaatttttgtgagaaacttccaaaatagctgccccattttgcatttctaccagcaatgagtgagagttcctgttgattcatatcctggccagcatttgttgttgtcagtgttctggattttggccatgctaacaggtatagagtggtatctcatcgttgttttaatttgtattttcctggcaacatacgatgtgggccatcttttcatatgcttatttgcctagactttatttttcagagcagtttaggttcatagcaaaattgaagggaaaagtacagtttccatatatcccatcccccatcctcaacactgcctcccccaccatcagtattccataccagactagtactaatttgttacaatcagcgaacctgcattgacacattattatcaaccaaagtccataatttactttagggttcaccctcagtagtatacattctattggcttgacaaacatgatgtcatgtatccacaattacagtatcacacagaatagtttaactgccctaaaaatcctgtgttctacccatgtatcctttccttctctggctgtttttaataattataaagtagawtttagtagagtaacgatgtttgtagcctgagaagacaactacagtttatattacatgtattggtcataaatatagggggaaaatcttcctctatagatgtgacttttggggacctacaggcaactgcttggattgccagtgttggggttgagggtcggggaacagagttggtaaatattttggggggaaaatcagaaattaagagacattatggaagagtaacaccaaattatttgcttattgctgttatagctttcctaattctgttaagattgtccctaattccctccagtgagaaaataagaacttttttyttcccagcttccctttctctttctctttgtctagaacttaaacatttattatccctagaacttgtggatttctgcaatttcagttaaaatttccaaatttytyttaaaaacactgtatttagtgctttaaaaaagtcatgtggagggcaggggctgataggtactttgagctagttagtagaatttctctgatggacatttytatccaatgaaatgtcctgtgttatcagaaaagtagagttaagacagtgaagtagtgagaatgctcctccaatggatgatttatggcttgtttttttttttttttttttcactttcattttaggttcatgggtacatgtacaggtttgctatgtaggtaaacttawgtcacgggggtttgttgtaagattattttgccacctaggtactaaagcttaataaccagtagttattttttctgatcctttccctccttcccaccctcaagtaggccccagtgtcttttgttcctctctttgtgtccttgtgttctcatcagctagctcccacttacaggtgagaatatgtacttctctgttcctgtgttagtttgctaaggataatggcctcccgctccatccatgttcctgcaaagaacatgagcttattcttttttaagactgcatagtattccatggtgtatgtgtaccacattttctttatccagactactgttgatgggcatttaggttgattccgtgtctttgctcttgtgaatagtgttgcagtgaacatattcatgcatatgtctttatgatataatgatttatattcctttaggtatatacccagtaaagaaattgctaggtcaaatggcagttctgtttttacctctttgaggagtcatgtggcccttttaaaacttgtttcaaaccatgttgagaacataaaaccctggtcctacctttgtcattagttttccattggctacaaattataggtagctttctaacttaaacatttattatccctagaacctgtggatttctgcaatttcagttaaaatttccaaatttctcttaaaaacactgtatttagtgcttaaaaaaagtcatgtggagggcaggggctgttaggtactttgagctagttagtagaatttctctgatggacatttctatccagtgagcttgtaattgtttgaatagcaatagacagtttgggattccttattctgggatttctggacacacattagatatttggtgaagcactatttggttgcttgatttgggtgggcctttgaattgttaggaagttccttaaattgaggtttgtaacccaggctttaggagatccctgaaccttggaagcaaaatattgttagtaattatatgtttttctgataacatagtgtacatagttttcatcagagttttaaagggtccctgacccaaaatagattaagaacttttaccttaattttgtagtgaactccaagtagaagtttctaggttggatattatagtataattcattacttggattattggtgagcatatagaacttaaactctgatcatctagcacaacagcagtaacctgattattttatagattttyttgacaaagcagtgatgtatggtataaccagagagatgttgctggttagaggatggttccatatggaggatgatttcaactttgaggaaaaattgttgttaatgataatcagactttttccagcttcccagtgattatatgttgttatttcttcagaccattggtataataaatatggtgktgttgcctcaaaatcttgtcaaagtttatcacctgtttagcctttttaatgaaaccatgcagtcttttcatggtagtacttttgttatttgacatataattcttcaggtaagctaacatccaagaattatatgctacagcttttaattctgtttttgttttcagaactcttcatcttggcttatacctatactgcctgatatgctccgacacatttttcagttctgtgttttggaaagcagccaggaaattctggaccttattcacaaggtacacagcaaatgtatttgtgttccttttcctagtaacttttgtagatttttaaaatttttcataattgctgttctgttggtcattcatatctcatggagatttgaaaagtcyggagatctgcataatgagacagagaactaggcttcttacatgtagcatgtaatagttaagttttgattggccatgcttcttcctcttattatgtgacttacacaggtgttttaagcactttctgatagcctcaatacagaaaatgaaatgaggaaaagattgcttttctctagccctcatcttgctgtttatcaatatgcttatagatcctgcaaagtatcttttaggatctgttggtaatatagagtctaattattgttgaaacttgtacttttttccctacttagagtgatcatatgtgttagaatcattaaaggaggagccgtttgatatatttaatagcatttatggggggaaatggcacttttgtacctttataatctgttaaattactcttgaattgttggcctctaaagtgactccttgttaacaaccttggattaacagtggtgatcttgccataggctagtcctagcccattaaatgttaggcatcaggaaaggtaccttatccttattaagtaagatcatgaatcaaaacttatactgttttaaatttatactaggttattaccacctttgagtttagcagagaatattaggagctatttttaaatgtgtgttgaatataggactgcattaatattgagtcttatgatatatgcaaaggatttatttcagtgacttactgagattttgacaattttgtattacttttataggcatgtttttttaaaaagagaattgtgttctttttttaaaaaaaaactttcctttgcatgactttttttttagtgcacaaacctattagaaaacagtactgtatttcaaaataagcctctatattgaatttctaaattaatctctgtgctatttcctacttaaaaaaacctcagtattcctaaagataagtgttagagtttatttttattagaaaaaattcactttcatgtcccccttttaccctgcaggtttggatggaactgttgagtaaggcttcagttcagtatgtggtagcagctgcttgcccatggatgggtgcttggctttgcttgatgatgcagccttctcatttacctatcgatttaaatatgttgctagaagtaaaagctagagccaaggtaagtgtagagggacatagtgtatttgtgtgttcatcatctaattattaatacagtaaccatatttttaaaaatctgtattgccttaagtgtgatttaattaacataagtaaggagaaaccgttattttattaggaccctgacaaaatgaatagtaatgtttatccattaaaattttgtgaaaagaactgtattttactgggattattttaaaaatatcatatttttgttgttgcctattcagttttratggttaatctttattgtttttttttcccctccctctgtaggaaaaaacaggtggtaaggtgcgccaaggccaaagccagaataaagaagtacttcaggagtatattgcaggtgccgacaccatcatggaagacccagccaccagggattttgtagttatgcgggccagaatgatggcagccaagtgagtgtacattaagtgtcaggtagtcatacatttacaagtctggctttcaaaggttatttaaccaacagaagattcctctgctgtctccatcagtccttccttccttcatcacactaattatagcctaaggaaaaattagagtaagcaaatacttctaattattttaaagctttaaaataggatttatatcttcttatgaagacaagatagtcattataccttctgtgggaaragttatggcttcaaaaagccaaattttgcttcaagtaattataggaaattgaaaaaatttcccgaagtatggggaaactttacttcaagtaatttcttatagtaacttcctttttctccctcttaggttgttaggagcactttgttgctgtatttgtgatccaggtgtaaatgtggtaactcaagaaattaaaccagctgaatccctgggccagttactactcttccatttgaactccaagtctgctttacagaggattagtgtagctttggtaatctgtgaatgggctgctttacaaaaggtaagattttgccccaaaagtaataaagacaaattaagtaaaccaatttccattagctgttaggattatttacaacagaaaagtgaaaattttcgatgtataaaaatccaagagttacagaaaagtgtccaaattatattgaagattatttctctcccatttacttttaactctggacttttgtcttagaacccctactcatacttccaactactagttatgctcatacttaatatttgctgttgactgtacagtctgttaagaaatatccctattaaaaaccgcgtatatgtgaaagtagtccagaaactattggtcatccattcctctatatgtcactcaggtatcactgaaaactacaaaggatgaggctttgagtattagacatccatctgtgtgggtagtagcaaaggcagaatttttggtcacaggaagaataacatctctgtatttaaaccaaaatcttcatgtttccaaataaaccattcccttccagcctctttaaccgttaacttctagggagatgtatgattttgtataagacatacttctgtaaatcaaagaaactttctactggctttgtttattccattgactggaattctggaaatttaactgtctgcacttgctgtgagagttacttgttactgcctsttagcagtttgtcaaagctgtatctaaaagtaattgagccatgctccattgcagctgacacccctgcttggcctctggaaagaagcaaagctcatctgtttttaggcaggagttggtgtgctggagaggcagtgatgctatgtttttgtgcctctcagacttagcagcaagtgttgacagttaggtttctggacactcacagagcttcatggacttactctgtgaagcccaggctgataactgagatgccacagaacccctcatggctcaccactgaggccatttcctgttggtttggggcaggcaacaaccagagagagtgggaagggttagttaaatttggggatagataagtagcttttaaaatttatatccacttttacagtatggcatgtgaagcttagggttcaactgttatctaataatgagtttttaaataacatttttaattagtgcttgatagatttcttttctgatttttttttttttttaccataatacactttaaaatctgtgatatatatacacgtgtaaactttggataggtagaaaatgaagttgtaatagttctgtgtgcatgttctgtagtcattcatgttaaaattttacaataatttggatgtaatacctttttttctgtgcaattaactgttgtttggagaagtaacagaatatagattcagtacaagtaagartttagaacttggtagtctacaaatgacgatttctgtatctataaagttaatgttcatacagttaccctatttgttttctgttgtattttaggagtgtaaagctgttaccttagctgtgcagccgcgtttacttgatatcctttcagaacatttatattatgacgaaattgccgttccattcacacgaatgcagaatgaatgtaaacaacttatatcatcattagctgatgtacatattgaagttggtaatcgagtaaacaacaatgttttaacaatagatcaagctagtgacttggtgagtaaagaaataactttcttaattagagatagaacatgaaatataggttagaaatttgtcatgacatgtttatcacaaaaacacattagtttgttgagtctgtatgtggcttggtagcctgtcatctctacccttgagaaaggttatttcattgtataggcttttcttgaaataagagaataacaaagaattttttttaaaccaaaattctgataaatcaatgcacctttattagaaaaagctattatattttgtcatttcagttttgcttaacactgcagagtatagaaaaaactgcttctacaagttcctgagtacttcttcctgctctcagcctataatgaaaatattcaaacatatagaaaaagtgatgaaattacataacactcatacttaacagctagattttatagttaacattttacctaatttactttatcacatacgtattcacctgcctacctctctatccaaccatgaatccatccagggcagtttttttaaatgcgtttctaagtaagtttcagatatcagtatacttcaggattttatataattaactaaaattcagtatttgtttatttttttttgctgttctgaggaaaaatttatgtgctaaagcacacaaatcttaggtggaccatttggtgaattttgacagatgcatatgcctatgaaacctgaaccactgtcaagatacagaacattatcatcaccacttcccagtaatctctgcctctccctgccaccgagtaaccattattctaattcccccccgaagatacattacttttgcctgttctagaatttcatgtaaatgraatcatacactgtgctctttggtgtaaggatttttcttagaatggtatttttgaaactaatctgtgttatatatatatatatatcaataacttattttttttattgcttgagttttatttcattgtattattataccacaactagtttaasccattctcccgtttatggacactttggctgttaccactttttgtctgttgtgaaaaaagtcactataaacgttcttctgcaagtctttgtggacatctgctttcatttttcttgggtaaatatgtaggagtggaattgctaaatcataagataggtgtaggtttagttttagaaaaaactacagacttttccccaaagagattgtatcattttaccctctgaccatcagtatgtgagagttctggttactccacatcatcaatatttgatgtggtcagttcttttagtgattgtctgatagtgttattgtggttttaatttccatttccttgatgactaatatgttgaatactttctaattttttattgatcatttgtatattttcctttctgaaatatcttttcaaaatcttgtctactttgaattaggttgtttgtttgttattgagttgtgggagttctttatgtatcctggattccaatcctttgtcaagtagatgctttctgaatattttctggcagtgagtggtttgccttttgattctcttaatgctgtctttggatgagcagatattttaaattttggtgaattctaatttatcagttgttttctttcatggctattatgttgtgtgacttcagtaatttttttttttttaactttccaagtggcaaaggtattcacatatgttttcttttgaagttttgtcatttagtttttatgatttatcattcatttggaattaatgtttgtgtatagtatgaagtagaggttgaggtttgtttttcttacagatatctaatttttccagcattatttattgaaaatactttcatttccctattggattgttctggcacctttgtcaaaaaccaactgaagttatataagtatgctgtgtatctgggccatttgttcaatgtatttgtctttccttatgccagcatccatgcttcattacagcagctttgtacttagtaagtgcatgagattaggtgtagtatatatgagttcttccttttttgagttataggatcagaaattgagtcacttcatttgtgttggtccccatgaaaatagtaatcttcatttcttatccccatttctagttgaaaaataatatagttgaatttttttgttctcacctgtggagagaaagctaaaattgctgtttttttccccctgggttctcttcttttataaagttattttcccgagtgttgttattctgtaagttttcctttttgcctcctctccctacttttttgcctgtctggaattaartctcaaattttctttatagtctaggttccctgcctactatttctgggaactttccttttttaagctcatcaaatggccccttctttaagatttgcttattcagatcttttactcttcagttgttttgacttgggctagaagataagcataaatatcagaatctctgggagagactttttttcttttttttttctgtaagggacttttgagggaagggcagttttcaaaggagccactgccttttgtatcttcattgaatccctgttttcctgttacctgccaaatatagacatttccctgcgatctttgtctcttgcaccattctcatgatttagttcctacccaggtactgtgtgctgtctactctcagtctttcttacgttcttcttttaggcatttttacttaaatatctcactgtcacttcacactgaacacaacaaaaactggctttttttttttttttttgacaaagatactctttttattccagtcacaaatcttgtcagcattttctttcagaaagtctcatgtgtttaggccgggcgcagtggctcacgcctgtaatcccagcactttgggaggccgaggtgggtggatcatgaggtcaggagatcaagaccatcctggctaacacggtgaaaccccatctctgttaaaaatacaaaaaattagccgggcgtggtggtgggcgcctgtagtcccagctactcgggaggctgaagcaggagaatggcgtgaacccaggaggcggagcttgcagtgaaccaagatcacgccactgcgctccagcctgggtgacagagtgagacttggtctcaaaaaaaaaaagaaagtctcrtgtttaatctcttctctatttccattatcagagcccagtcagatcttagtactttatatctaggtcctgactcatctctagggctccaggcagcctctggtccatttcattctgcatgttgtgctagactagcaatgctctttttgtgccaccctgaacatccctctcctgcttaaaaacattattttccttttccttgctttttcatttttatctttcttcttttcatcactttcttctaaatgctctatctcttatctcctcattatttctcaaactttctccactcacgcccagttagctttcttcttgcgcaagtacgctacacttattcacttctgctcattctcacttctgggcccgagcttctatttcctttgccaggaattccccatccctaaccctctgtgcttatccagagttcatctctttttctgtgtgttgtgctcaagctatgataaacttcaattccacagacagtgtcctgttttccactccctacctcactttgtttgccaagatgtccctataatccctgattggcctgttctttaaaaaccaagcataagtgttatcctcctctgacaagtctcccactaatctcttcttctaagaaggaataaggagtgctctgtattcccacagcaacttgcacttacctcagttatatgttacattttcttaattatttatatctctcccacattagtctctgcattttttgagcatattaagacattatatcttatttatcttttaataaatattggttgaatgattgaattaatttgggggtaactgaggcttttcctcagttgtctacagtcattgaaaagtgacatgagcatagtggatttaggacaatgtttttaaacttttagcattgtaaccctgtttcaaataaatcttatacattgtacatttcaaatgggtagtttttatggtatgcaaattatatctgaataaagttgttaaaaaaaagactgactgaacagtctttcaatggggcttgcaaagtagtctggtacaacagtcctgtagccttagatagctcttggtaattaagtgaatgataactgcaccattttgttctgttctgttttgttttgttttgtttcttttccttcttccattgcctgggcatttccaccagaagggaggttaaagaaagaaagagaatgattcagttagcaacacttagccacttagtaaacagccactcttaagttttcacgagttttagagttgaaaagaatatttttcccaaaaagaagtttgtgagttttggaattccttcatgaacagttagtttatatttgcctgtagctttcttgtttcaccagagtattctgcgggtgttaaatgtgattttcctcaaagtcatttagacatatttaaaggttagataattttattcttctcaagagaatgtctttcttaaagaatataatgctaatgttaaattttagtcagattaaaataaaatttagttgggaagttttagacattagtttactgagtactaaaacaatattacatattgtggaaaccaaaattgaaacagaaagcttgctgtctaccctttaggagcttacagtctatttggggttgatatgattaatgatttttaatttcttttttttttaataggtcactactgtttttaatgaagccacatcatctttcgatttaaatcctcaagtgttacaacagttagatagtaaacgacagcaggtccaaatgacagttacagagaccaaccaggagtggcaagtgttgcagttgagagtgcatacttttgctgcctgtgcagttgtgagcttgcagcagcttccggagaaattaaatcctatcataaaaccattaatggagacaattaaaaaagaagagaatacactagtgcaaaactatgcagctcagtgcatagctaaactccttcagcagtgcacaacaaggacgccctgtcccaattcaaaaattattaaaaacctctgtagctcactttgtgtggacccatatctaactccttgtgtcacatgtccagtaccaacacaaagtggccaggaaaattctaaaggtatatacctaaacttttatttggggtagagaaataacctttkaaatttgtttttgtttacttatgggtataatttaagcacaaatccagttcatgttagtgttttttcccattctgagagaaaaggcttgattataacaaaactctttgttacatgaatttgcacataatacttaccagtcacaaccctgtaagttcaaaaaagccattcatggaagatctgatagctgatataaggtgactgaaatctgtaagacaggtgttcacccttacctttgccttcaaaaccatcattatatggtttactgtatcaagctagaaaaggtaattgtatcaaatgttatttaatgaattttttttccttaaccaaaggagcaaccctattgactgaaaaagtcattataaaatctctcgtttccctaatttagtgcatgttttatgagattagtgaacttttagtacttttagtaaataatacttaaccaacttttttgttttcacttggagaatttgtatggaaaatgagaactgccctctgtaggcaggtcttaaagaccagtgttttattcatatgactcagtcctatgtgctttttgtatgtgtgattgttacaagattttgggaaaacaaattatttgaaatgtagtagacttacagctttggtgcagcatagatcttgaaaaatatgtttatgaactagaagaagaaaggtggacattttgaatattaacatcttaaaaatacattggggtcattctcccccctcttacccccctggtccattgctatataaggcagcatcattttgcagtgaccaattttttttttttaattcatggtgactctgcttttaaagagaacttgcttgagatattttttaatatttctcgttatgcttaggcacaataattttttaaaaagtaataggccaggccaggcacggcggctcacgcctgtaatcccagcactttgggaggccgaggcaggcggatcacctgaggtcgggagttcaagaccagcctgaccaaaatggagaaatcccatctcaactaaaaatatataattagctgggcatggtggtgcatgcctgtatcccagctactcgggaggctgaggcaagagaatggcctcaacctgggaggcggaggttgcggtgagctgagatcgcgccattgtattccagcctgggcaacaagagtgaaactccgtctcaaaaaataataattaattaattaataggccagggaccaggcagtggctcatgcctgtaatcccagcactttaggaggtcgaggtgagcagataacttgaggccaggagttcaagaccaggctggtcaacatggtgaaaccccatctctactaaaaaaatatataaaaattaggctgggtgcagtggctcacgcctgtaatcccagcactttgggaggccgaggcgggtggatcacgaggtcagaagttcgagaccatcctgactagcatggtgaaaccccgtctgtactaaaaatacaaaaaatcagccgggcatggtggcaggcacctgtagtcccagctactcaggaggctgaggcaggagactggcgtgaacctgggaggctgagcttgcagtgagccgagatcgcactgctgcactccagcctgggcgacagggcgagactccgtctcaaaaaaatatataaatataaatatatatatatatatatatatatatatatatatatatatatatatatatatatataaattatccggacgtggtggcgtgcgtctgtaatcctagctactcaggaggctgaggcatgagagtccccttgaacctgggaagtggaggttgcagtaagccaagattgcaccactgcaccccagcctaggtggcagagtgagactccatctcaaaaataacaacaaaaaattaataggctgggcatggtggctcatgcctataatcccarcattttgggaggccgaggcgggcagatggaatgagctcaggagtttgagaccagcctgggcaacatggtgaaaccctatctcttcaaaaaatataaaattagctgggtgtggtggtgtgtgcctgtagtcctaactcctcaggaggctgaggtgggaggattggatctcttgagcccaggaggtggaggttgcagtgagctgagacggtggtactgcactccagcctgggcaacagagaaagaccctgtctcagaaaaaaaaaattatatatatrtgtgtgtgtgtgtgtrtatatatatatatatatatatatwcacacayatatatacacacacaaacacattaactgaagtcacaataattttttcatgtgctgtttctcattgttcagatggctctgcaacctggattgtattaggtataaatcctatgcaaatagactattttattgccatttcattgtctaaggaaaatgtcattggcctataaaagttgaggcctaaaagacatagtttaaaaatgttttatctcttatggagctgaaaacatttggtatcaccaatattatgattaaaaggttgtttaacttttttcttattaggatccacctcagaaaaagatggaatgcaccatactgtcaccaagcacagaggtataattacactctacaggcaccagaaagctgcctttgctatcacaagtaggcgaggtcctacccccaaagcagtaaaagctcaaatagcagatcttcctgcaggaagtagtggaaatattcttgttgaacttgatgaggtaagtagtttttttttttttttaatgctttgatttttaaacaaatatctgacttacaaattgagaactaagttgtattagcttccagagttgtttttaagtaaagaaatgggattaatttttggagtactccaacaatatgatccagaaaaacgrcaaacttcaaatatctcatgtctcttgtaatttttrccagcttaactttatcttcctaggcaagacagccttgtaaactaattcagtcctrtagcagtgactgtagagaaggtgctcaataatagtgaaagctaacttttctctgtcctttcaatgcacaaatgtcatataattgcaacccacctgacttttttagtcaatttgatatttattaaatgcttagtgtgaggtagggttctaaatttatttttcatatgaacagccagttatcccactattgaatcctttcctctctgatttataatggcacctctgttaatggcttcatatgtgtgagggtctattcaggctttccattatctcccattggtccacctgttacaccgtacagtcttaacaagcagtggtttttaaaaagtgttttgttttgaaaatctgacagtcacattattagcaatagaatgaatgctctagttagttctttggaatgcaaggcataggaatgtacctcagttcagcagtaaaccatcaatactaaaagacatgtttctgtaaaatataaaccccttttaagtttctttttaaaatcaacagcttatctatatttcccttaaaacattctgtaaagtctttttcattgacaatatttccctataataattgtaataaaaattttactgtgattttgatatttatatctctagtttgcatagttattcctccaattaaacataattttaaaaatataaatatctttttggggggacagatttatggaccgtaattactgctgaataagaattattaatcttggggttagcttaaacagatgatcttgtactatcccttaagtgaatgtaaataaggacacatcacttcatctatcttctctctagctgacaagtttctttgaggtagagagaaggaggaaaaaaaatgtcacttaggactatctctagaaacagcacatatccgtctgttccttatcctcaaccccaaaaaagtgttttactttggtcacaaaaatctagttaggtgttgtaggcccctgtaaatttaattattgggaaatgtttataattgagacaaacatgtctaataattgcttacttggttaatgataacattatgaattcttagatggtgacttttaaattcttttgttaaaattttaaatgtattatgattttttctgaaattctgtttttatctaacatttaattttaaggcccagaagccttacctggtacaacggagaggagctgaatttgctttgacaactatagtaaagcattttggtggtgaaatggcagtgaagttgccacatctcygggatgctatggttggcccattgaggaatacaatcgacataaataattttggtatacacatatttttatgagtccartttttaacaaattttaatgtctattaattgaatatatccttataaaataaaaatgcctctatgcctctacctgtttattccagaccagctggtaagttttaaaatggaaacttggtttaaaaaaaacacacacctttattttataaaagagatatttgggttgggcatggtggctcatgcctgtaatcccagcactttgggaggcccaggtgggcagatcacttgaggtcaggagtttgagaccaacctggccaacatggcaaaaccccatctctagcaaaaatacaaaaattagctgggcgtgtagtcccagctactctggaggctgaggcaggaggattgcttgaaccctgggggtggaggttgcagtgagccgagattatgccactgcactgcagcctggatgacagagcgagactctgtctcaaaaaaaaaaaaaattgtttttaaagagatacttgaaatggatcactatgtttaagttctttggttgctctacatgtagtaccccagcacttaaattaaggtcatggcatttaattttaacactaagaagcaaaattgactctcctatgctagctgaaaaagtgctaaaagtttttgtgtgctctagattttgaaaaattatttgccagataatacagacaatatattttaacagatggaaaatccctcctggataagggagatagccctgctcaagaattggtgaattctctgcaggtttttgaaacagcagcagcttcaatggattctgagcttcatcccttggtaactaactaatgcaagtgtaatatttcttcaaataaaacaagtggtcttattaaaaagtcttaaggtttgaaaggtacagctttgatgtcatccttattaattgcatttttctttgctgtggtataactagattcctcckttactaacagtgcaactcctgtgggctttgatgtagaccaggctgcttgaatttaatagaaaacccaacctggaagcttagaatgtgggggcattgaggaaaggactctgatgacacaggagccagatgtaaataggaaagaaaactgcagccctgttcatccagatgatcctaataatacagctccaagaaaggaaaagcatatataatgaaatctgtttcctagataagtacaaaggtgaaaggagtcacctgcctaaggtgaagctggtcagtggcaaagatagaacactggtttgggatttttttaaaaaactattaaaatgtttcttacaaaagaattaggacagagggaggaggaaaatagagaattatctggtttttttcatagaagaatattattcttttcatatctctgcaataggaagctgtctgcaatttaccccattttgaagggtattagcccagttctctattgttatttaacacaaaagggagaatctatgagagggtggagaagaatggatttttttttttgtacatagtaataaagtatgtccttttacttgttaaaagttttgctgatttactgttagtaaagaaaagtaggccgggcgtggtggcttacacctgtaatcccagcactttgggaggccgaggtgggtgaatcacgaggtcaggagttcaagaccagcctggccaatatggtgaaacccccatctctactaaaaatacaaaaattagccgggcgtgatgggacatgcctgtagtcccaggtacttgggaggctgaggcaggagaatcactggaacccgggaggcagaggttgcagtgagccaagatcgcgccactgcactctagcctaggcgacagagcgagactcagtctcaaaaaaaaaaagaaggaaaaaaaaaagtagagtccatctgtacgctcttaatcttcataattagcaacatgcattcagctgaactgtaaggcacatcaaactgttgaacagatacctggctctcatcagcattaattctggtgttccttgtagcagacatttagtaaggtgctgttgtgatgctgttgtgattataacacctatggtaagccaggaagctacagtggacgatacctaccaaagtatggtgctagaataaaatcaggaacactcaagccactgaataaaaattatgtacctaaatctaaattagtgctaccaaatttggagggagctggtgatgtgtggtgctgttttccagcttcagtaggagaatcttgccaagtactttttggtttgtttcctgttaattttggaaagaattgagtgttcctatatgcctaagagatgatatgagcagagcagaggttctatacctttttttcccttctttttgaaagagttgtaatacattaatttgtatttggattagttttctattgagaatgttttggcagtaatgttttgaagtatttggagatatttttagagtcacttagaatattgaaaactttcctgagtatgggctattatagttacatattaaacagtatttcctaataattctaattgccattaactttttgtttttagttggtccagcatttgccacatctttatatgtgccttcaataccccagtactgcagtgaggcacatggctgctcgttgtgtaggtgtcatgagcaaaatagctaccatggaaacaatgaatatttttttggagaaggttcttccgtggctgggagcaattgatgacagtgtcaaacaagagggtgcaattgaagcacttgcctgtatcctttttcatttgacaaactgttcaggaattatattcatttcacttaaggataattaaaatgaaattgatgtgttctaatatgcacataaataacctgccttgttccaaaaaatacctattctttttacatcttattttgaaatatttttgtattttattacaaatgtgttacaaactgatttgcattttatgataaaaattttcatgtggaaagtttggaaaattgctattgattttaaaacatctttttaataggcaaaatagttttatgtactttatgaactatatgtctagtaagtgatttatttgtttataatcagtgtcttattaatcaggtattctataggtagtccctatgttataaacattttatgtttttaaagtttgttcattacttgggtttacaaatgaccatattatactagataattagaaatatacaggcaagccctttgctaagggtatggcagcagctaacattctttaactcaaagtatctgaaagatatttcacagagctcaaaagatggatgaagatcaaatcagtagaaactctggttcaaaaatactgaagattacaggagaactgcgcttactargctcactatatcctgctggtgattgtcaagatcctggtgggaaatttggaattaatctttgagtgacactcagttatattcctttacttacaatgtgacttattttattttgacattggaattccagacgcttgtagcaatttctctatgaaaaaaatcttattggtaaagctttctccagccttcctcagaagaaaaacataattttatattcctaatcatgagaaagttacataatattttccaaggagcaacaaaatgggcagatacttttataattgaatcataggcctggagggtcagtcttttccctcataatacagatgagaaaatggtgagccttttaaaaagttaaaatcttggtatcagtttgtttgtgaaaacatctrtcttggaaccatttcaaaatttccttaatcacttactcaggtgtaatggaacaactagatgttggtattgttccatatattgtccttttagttgttcctgtattaggaagaatgagtgatcagacagacagtgtgagattcatggccacgcagtgctttgcaacgctaattagactcatgccacttgaggtaagtcaaagatacttgctttaaagacataatgttttctataacttgatccataataattgtaaccctttttagggccaggtacaaaggctcatgcctgtaatcccagcactttctgaggctgaggtgggtggatcatctgaggtcaggagtttgagtccagcctggccaacatgggtgaaaccctgtctctactaaaaaaaatacaaaaaaaagacaaaaacagttagctgggcatggtggtgtgtgcctgtagtctcagctactcgggatgctgagacacaagaattgttggaacctggaggcagaagttgcagtgagctgagatcgtgccactgcactgtatgtatcctgggcgacagcgagactccatctcaaaaaaaaaaaaaaagaaaagaaaagaaaagtaacacttgttaaagaacatgtcaggctaaaaaaagaaggcattatttcaaaaatgtttatattacaataattaagatttttaggcttttaattggtacttttttcctttaacacacagagttttaatttaagtaaaacaagaaatcagacactatgattcctaaaaaaaatttactaatgcttttctagaaatagaattgttcctaagtttttctggtaacatctaggtgtagactgtgggctaaagtttaggcaaaagataaatttgagagatggtaattaagactgtaaaaagcaaatgaggtctctgtgggagtatgaaaaagaagactagaaggatcatgttggagtatttcggagtacattcatgggggcacaaataatgtgtggccaatgcaggaaactgaagtggcttgaaacacagaaagagccaggaataattcaggaaatagtaggtatggcatgtcatccatgttgttaacatgtataagtacttcctttttattgctgaattgtattccattgtatggacatactgcattttgtttatcctgtcaccagttgatggatatttggattgttaccagcttttattaatagttattatgggctgggtgaggtggctcatgcctgtaatcccagcactttgggaggccacagtgggtggatcacttgaggtcaggagttcgaaattagcctgaccaactgaaaatacaaaatggtgaaacctcgtctctactaaaaatacaaaaatttgtggggcgtggtggcrcacacctgtaatcccagctactcaggaggctgatgcaggagaatcgcttgaacctgggagacagaggttgcagtgaaccaagatggtgccactgcactccagcctggatgacaaagtgagacttcctttcaaaaaaaaaaaaaaaaaaattaagttattatgaataatgctgctctgcatttataagtctttgcgtggatgtgtgtttttatttcttttgagtaaatacttaagaatgaaatgctggatcatatggtaagtttaattttttttataaaactgccttattgttttccaaagtaactgtatcatttgacattcctaccagcaaaataatgagttataaataggatagcctctttgaaaaacagtttggttatatctggtaaaattgaagctacccagcctaatgacctgaaaaattcatcctacatgtacacctagagaattcaacacattttcaagactttttttttttgagacggacttttgctcttgttgcaaccaggctggagtgcaatggcgcgacctcagctcactgcaacctctgcctcccgggttcaagcgattctcctgcctcagcctccttagtagctgggattacaggcatgcgccactgcgccctgctaattttgtatttttagtagagacgggatttctcctttttgatcaggctggtctaaactcccaacctcaggtgatcctcccgccttggcctcccaaagtgctgggattacagacgtgagccaccacacctggcgaagaatataacatcatttatagtagtctgaaactgaaaatcacccacataatcatggatagtagataygtaaatcatgtactgttatactgcaagaagacaaaccacagacacatacagtaatattcataaatctttaacataggattccttttttattaaattcaaaaacaggcaaaagaaacttggtgataaaggtataaagaaaaataaagaaattaccataaaagtcagtgaaatcattacctcttgaggaaaggagagagaaggttatgattgggaaggagcatatgggatcttctagggtgactgcaggggtatttttcttgatctggttgtatagatgtttgttttataatttactaaactgtttcttagattatttctctatatgtatattttacctcacactaaaaaaagtgtgaaaaaaaattaccactgcaacaacaaagatactagaccacagtatcaaaatacctaggtgtcatttccagaattgttttcatcctctgcttcctagattttaactcagattctttcaactccaagatcttcatcccacctttaaaccaaatgggttgtacttagtctccttggccctttcttagctttggaataagtgagcagtgggaagctattatgtgttctttaaacaaaggagatgatgaccgcagtttttgtttgtttttaaggaaaattagtctaacagctgaaagtagtattttaggaaaatcagtttaatagccatttgaatatggattagaattgaaagtgcgccaaaatagagctcacatccactgtgaggtgataaagggtctaaactctaatgcttagcagtagtcttttggggttttcttggttgttttttgtttggttgtttgtttgagttggagttttgctcttgtcacccaggctggagtgcaatggtgtgatcttggctcctgcaacctttgcctcctgggttcaagcaattctcctgcctcagcctccctagtagctgagattacaggtgctggccaccatgctaattttttgtatttttagtagagacggggtttcaccatgttggccaggctggtctcgaactgctggccttaggtgatccgcccacctcagcctctcaaagtgctgggattacaggcatgagccacccggtttgtttgttcttaaggaaaaataacagtacttgataacagattgacaaaagagattttgaactttaggtattgagaaaagattagtaagactcactttgatagttgtgaaaattactagaacatgatacagattttgcttctggccatgatggaaaaacaggcaacagatttatcctcctgccttaactagaaaaccagacaaaatgtaccaaacagtggttttcaggcattggacaacaggcagcactggatagtgaaccatgagagaaacgaaacaaatgaagtgccctagcttattgtctggaggcatagcacagagaagggaaacccaaagagagcccagtagtcttgctgagctgaagagttaagacagaattagcaaaacagagtacytgaaggtaggtactgcacagacaggaggtagctgcacagagagaaagctccagaggtccacaggggggttctcccaagcctttggctgagtattcatctgcatgtactgtgacatctttgagactggggaaagagtcactgtggaaaggagtaggtggagcaatttccagacctcacacagggctgggaatagtttgtatttccactaagcagagtaagagtaacaagaccttctaccatactgagcatcaagtccttagaagcatattgcctcagtaatagagccaagttagcccttgacaaaaggctgatttggatcttccttgataaagcttaaaagcaagccttaacgggttctaattaatttcagctaaactaaatagttcccagaaaaaaaagcctcaacatatttaaaggaataatttwaaaaaaatacagcacccaacaacataaaacttcagatgtttgacattcaccaaaaaattaccacgcccaaaaatatgtccagtaactgggggaaaatacagtcaacagaaacagtccctgaagagacccagataatagataaggacattaaaatatactccaaggctgagtgcagtagttcacctctgtaacaccagcactttgggaggccaaggcaggcggattccttgagcttaggagtttgaaaccaccctggacaacatggtgaaaccctgtctcaaaaaaaaaaaaaaaaaaaaccatatatatatatatayacacacacacacacacacacwccatatattcaaggtagaggaggaaagcatgagtgtgatgacgagcacaatgaaaaatataagaatgacccaaattgaacttctagagatgaaaaatgcagttataaataaaaacacactggattgcattaatagcaggttagacactgtggaagaaaatattagtgaatttgaagatacatagcaatagaaacaagaatgatgtcgtttaagttcattcctgttcctctttattttgattctctctgttaagtcttcatagaaaaaatcatctacttttctgaaatgcatgttgtcaaagaatcttggaatgtcaaccagtgatttttatagaggctctaattccctgcactgttagtaacttttgctgatttttatggacattggagtgagaaggacactcacgaggggttgctggcactgaaacaatattcgtaacacttgggtttagggtttcattgttagggaatggacctagttatatggccctgtgtcttgtcatttcttaaaatttccatgaggataaatatatgaagattttggtatttgtaaagcgttgtgcagaaagactttattttaatgattatcattatgttgttagatgttctgaaatgttagtttttctcttagcagataaagttaattccaatacctttgaaaatagactcaatctacatacctcactgccctaatgctatttttagtgttgtgtggaatatatattttaattagatttaattgaaattctgtttccagaattttaaatttcttaagttgagagacatcataggacagtagttctcaaattttttggtctcattacttttttagtctttcattttttattaataaaaaaaatgtggctgagcatggtggctcacgcctgtaatcccagcactttgggaggccgaggtgggtggatcacgaggtcaggagttcaagaccagcctgaccaactggtgaaaccccatctctactgaaaatacaaaagttagctgggcatggtggcacgcacctgtaatcccagctactcaggaggctaggcaggagaatcgcttgaacctgggaggcggaggttgcagtgagttgagatggggccactgcactccagcttgggcgacagagtgagactccgtctcaaaaaaaaaaaaaaaagttacggcgtccaacatgatgttttgaaacgtatcagaccaattaatataccttagttcatacagtcatcatttttttggtgaaaacccatttaattaagttttaatcttttagcagctttcaagtgtatttatcattaactgtagtcaccatgctgtacagatctacagaatgtattcattctatgtaaactttgtaccctttaaccagcatctatccatttcccctcagtcctctcccttccacgcactaagcacctagtaaccactattctactctgcttccatgagtttgacattttagatttccacatataagtgagatcacatatttgtctttctgtgcctggctggtttcctttagcataatgtcatccaggtttattcatgttgtcacaaatgacaaaattwccttcttagaggctgaatagtatccagttatatatagatacactacagtttctttatccattcatcacatagacgaacacttgggttgattccaaatctcagctattgtgaataatgctgcaatgaacacagaaatacagatatctcttcaatgtactgatttcatttcctttggatatataaccaaaagtgggattgctagattatatggtagttttatttttaattttttgagtaacatccatactgttttccataatgctgtactaatttacattcccaccaacaatacgcaagggttcctgtttctccacatcttcctccacacgttttgtctttttaataatagctattctaacagttctgaggtaatatctcataccagttttaatttgtgtttccctgatgatttatgttgagcattttttcatttatctgctggccatttgtattttttttttaagaaatacctattcaggtcctctgcccatttttacatcttattttctttctgttgagttgagttccttttatattttagatactaacctcttatcaagatttatggttcgcaaataatttttcccattctgttggttgtctcttcagtccgttgattgtctcctgtgctatacagaaagctttttagtttgatgcagtcctatttgtctatatatgttgagtatcctttatctgaaatgcttgtgactagaagtatttaagatttcagatttttgaatgtttgcattatacttaccagttgagcatccctaatctgaaaatctgaaatctgaaatgcaccawtgagcatttccttcatttgtaatgctggaaataacaatgttttagatatttggatttgggatgctcaacctatgttttgattgttttgggtttttgtttttgagaaaaggtctcactctgttgcccaggctggagtgcagttgtatgatcatggctcactgcagcttcgacctcctgggctcaagtgatctttccaccccagcctcccaagtagatgggactacaggtgtgtgccaccatgcccagctaactttatttattttgtgtggagatgggatctccctctgtttaccccgggctggtcttaaactcctgggctcaagcagtcctcctgcctcartctcccaaagtgctgggattacaggggtgaaccaccatgactggcctgtattttgattttgtttcctgtgcttttggagtcatatccaaaaaatttgtccagaccagtgtcaaaaaggcttttttcttatttttttccagtaattttatagtttccagtcttacatttaattttttgatcgtgacctgagttttgaacttggtgtaagatacaaaggtccagtttcattcttctgcatgtgaatatccagttttcccaacaccatttattgaagaggctgtcctttccccttgtgtgttcttttgtcaaagattaactgtaaatgcatgcatttatttctaggctctctagtctgttccattggtctttgctgtttttatgccaacatcatacagttttgattattatacctttgtagtatattttgaaatcaggtagcgtgatccctccagctttgttccttttgctcaagattgctttggctatctggggtttttgtggttccacatgagtttttttktttgtttgtttttatagaaagcttattcagagggataatagagaaccatatgagttttaggattgctttttctatttctgtaaaaaatgccactggaattttggggattagggatcctctgcaatttagggattgcatcacatctatagatagttttgggtagtatggacattttaacaatattarttcttccagtccaagaacatttattttccatatttatgtccatttatttgtgtccccagcagtttctttcattaatgttctatagctttcagtgtatagatctttcacctccttacatttattcctattttattttttgttgctattgtaaatgggattgttttcttgatttcttttttcacatagattgttgtgtcaggaccttgttacactcttaaaaattgaagacaccaaagagctgttgtttattatattttctgtaatagatactaaaactgggaaatttttaaataattcatttaaataacaaacctacatgttaacataattaacttttttgatgaaaataacttttctaaaacaatgtgttagtgagaagagtgacattgcattatactattgcagatcttttttatgtctggtttatgtttttgttttttgggttttttttttttccttgaaacagggtttcactctgtcacccaggctggaggacagcagcacaatcacagctcactgcagcctcagcctctcctggactcaagcgatcctcctgccttaacctcccaagaagctgggactacagtcccatgtcaccacacctggctattttttaaaattttttgtagagatggggtcttgctatgttacccaggctggtctcaaactcctgggctcaatcctccaccacacccggccagtatttctggtttaatggtagataactggattctcatgtttgcttggccattcagtctgttgcaatatgttgttttggctcagggatatataaaggaagtccagcctcacagagatagttagaaaagggagcaatattttgacagccttctcaaataattgtggatattattttatctgatagcataccagaactcaaaaagagaaagtttgttaagtgttatgtgcaatatagaatctaaatcctatcaatgaatgtttcatactctcttacattgaaattcattggttgtcttacacttttgtgatcatggtatctcccctgccaggtaagtatgtcttatacttttgaatggatcttttattacccatacatgttttgtaacatcatgcgtcagtcatttggaaaatattggttcattgagttacgtaaatcttccacaggtggacacaattcattatataatattttaaaaatcatgtttattatcaacagcataaaattgtttttattggaaactgtcagcttctcttgaaaatatgaattttatcagtgacaacaagttaatgtgagttgttttcctttaagtgacaagttcatttttgagaaaatgtcagccaaataccaaagtcggaatacccacagtttatcagtcctttcaagtaaaatgttgttccattaaaaaatggctatgttaatatactttctttctcctgggcacagtttgtctaaagaaaagtaataattattttctggtgtttccaagtttaatacccataaatctttattttaagaatatgaaacatcaaccacaaacagaacatacagttagtacatccaggatggatatataatataaacactactgagtttgtcaaggaaattcttggagtattaaagacttcatatttgggtttttttttttaaaatggctagttcagctcctcaacagattgtactttgataagcagcagaattcacagtttttttcctcacagaatgttaaaaaagacatgcattaaagggttgagatttattaaaatcgatcatttttactgctctatcaaggtattttttgtcttttttttttttttttttttttttttgagatggagtctcgctgtgtcacccaggctggagtgccgtggcacaatctcagctcactgcaacatctacctcccaggttcaagcgattctcctgccagcgtggggtagctaggactacaggtgcacaccaccacgcccagctaatttttgtatttttagtagagagacagggtttcaccatgttggccaggctggtcttgaactcctgacctcaagtgagccgcctgcctcagcctcctgcagtcctggggctgggattactggtgcgagccaccatgcctcgcttatcaaggacatttttaagtaacactggctatttgaaaaaatgctaatgtatagttctaagaaatatgactactagcacattttggtgccattgccttgattctttcagaggtacacgcagttttctccatggtaacttttgtaacatctacgcagatatcaacatggtgattaaaagcaaataatgtttttcttttattatgaaatagttgaaaaggtcttagagatccataggggtcgcgcagaccacattttgagagctaataccctagggtatcagaacactaaaattgagaagtgccagtaatggcatttaattcaaaattaaactatgcaactttatatgcctctttatcaaataatgcatagtgtgggaaaatgaagttgtagattatggtctttcagatattccatatgtatttactagtagactaattgtagcacctttaatgcttgtcaatttctttaaccwgatttgtcttcaagtctttgtacaattttcagaattcttttttctntgtgtttgttttgtgtttatttgatctaagaatgaaaactgtgagtacgtagtttttaataactttaaaaaaatcattttaggcaggcattccagaccctccaaacatgtcagcagaattaatccaattgaaagccaaggagcgacactttttggagcaattgttagatgggaaaaaattggaaaattataaaattccagtaccaatcaatgctgaactcagaaaatatcagcaggtaagttttatacaatagtgagttttcctttcaaatgaaccttgaagcgttgtgggtttgttggggggggcttttgtttcttttttgagacagagtcttgctctgttgcccaggctggggtgcagtggcagaatcatggttcactgcagcctcaaactcctggactcaggccatcttcccacctcagcctcccaagtagctgggactatacatgtgcaccactatggccagctagtttttttttttttttttggtagaggcagcgttctcattttgttgcccatgctggtcttgaactcctggcttcaagtgatcctcccaccttggccycccaaagtgctgggattagagatgtgagccaccatacctggccttaaagcattttgtaaaatcgatttagtaaaatcttgtgtttagtgtcttatacccatttatttctcttttgcatatagaaatatttttgttttgtgcaaacgttgtttataagaaaatgtttttataagaaaaaataaatttatgatgtattcacatttatgatttttctctctatcaggatggtgtgaactggttagcatttcttaataagtataaacttcatggaattctgtgtgatgacatgggtttaggaaaaactttacagtccatctgcattctagcaggagatcattgtcataggtaatttaagatgttattttaaaataaggtttccggatttggagaaatgtaaacaagctggttaatttattgtgttttgctattgtaaagggcccaggaatatgcaagatcaaaattagcagaatgtatgccacttccttccttagtggtttgtccgccaacattaacaggccattgggtggatgaagtaggtaaattttgctctagagaatatctcaacccgttgcattacactggacctcccactgaaagaataaggtaagagttgtatgacaataacaaaatatttcatctgttgtcataattaagataaggaacagtaacatttattaaagtgaattctaattagctcttttggttgtatgacatagaaacttcacttatgaaaagtgaatgtactttgggaagatataatcagtgaggctcatcaaaattgaggaattttaaccattgtacaataagttgagctttcctagagctggagaactatcaggaaccaaagccattttgtatgccccttttgggagtctgtgaccatagcatctttttggtgcttctgttttattctcattttctacccactttcctgagagctctcctttgagccatgtgcaggggaatattcctgtagtcctaactgttcaggaggctgaggcaggaggattgctttagcccaggagttcaaggccagcctgggcaacatagtgagttcccctctcttaaataaaaaagagttcccctttgctttgttccctttccttccctctccacagaagtacttttgttccactatggctgctttagctgccgctgcagtcatggctgcactaaattttagcattgtttcagctttaccccttccctattaactagtacatctcttatgttcctaactgtaaattttttcaagtggaagctcattgatttcagctcattgattttttaaaggttggatagtcatagttgcagattagtccatagatttgctgtactcctgtgttaataatagcaaatattattattaaataatgttgttattaaaatttttagtttttatcttgagcacttactggccaggcactattctaagcagcttttcttttatgtaaaattgtgtattatgtatagaaggagcaggactgaaaaaaaaactaaacaaaaaattgtgcattatgtattctcacagtcactttatgaggtaggaatactgttgttccaatttgcaaataaggagtctaaggcatggggtctgggtccaaggtcactcagctaattaagtggacagagtgaggctttgaatacagtcagctcaaaaacttgcactcttgagcagtttactatagtgcctctttgatagaattcattcatttgtaagtgawagaaattcaactcaattctcagtttcaatattcagttctcaatattcaattctgttagcttaagcaaacagaaaattcattaattcactaacttgagaatttcaggggcagattgttgcttcaggcccatctagattactctcattcactcttcctccccttacataacttattgttactattgggcttcagtctacagttggtagataagatgacaatgggcagtctctggcccatattctcttagcttggcaactgtagtaaacagatcttccctctctctcatgaatatatcagtactggagatgactgactggccttgtttgggtcatgctcccaaaacaacctttgtggttaggggattaagtattgtgaatagcttaacctggttcaaatgcttcatttccttggtgattatggggacacatgattggtagttcccccacatcacctagaacaacatggagtgagaaaggaatagtgcccctaaggaagagatgttggcaaataaagttgaaatgtccaccatattttcagtctgatgttcatctcttttctaatcagactgagtagggcaacacagccagatcatcagaagagtagcccttcagggtcatgtatgtagagtaagcagaagggaatgctgggcttagtgggcagattgaaagcactttatacaaayggtagctattaagaacttttcagggtctctgttttctaattttattcatttctaaataaaggttacagcaccaagtaaaaaggcacaatctaatagtggcttcatatgatgttgtgaggaatgacatagatttctttaggtaagaattaattttttttttagaaaaattaatatcaaatttgaagactsttaatattttcccackttaaagattcttcatatagttcctgacatacagcaaaagttgtaaaattttctatttattctcccttagaaatattaaatttaactactgcattcttgatgaaggccatgtcatcaaaaatggaaaaacaaagttgtcaaaagcagtaaaacaactgactgctaattataggattattctttctggaacaccaatccaggtaattatttattattattwtttttaattatttttatttttatttttcatgtttgccaggtggagggtaggcttggtatttggcggtgaattaaagaagattttttattgttgttatagtaatgataattttccagtatataattattgcctgcttaatggttcattggtaaacaaaccaggttttaaaagtcatttttaaaatgtaattttagactatataaatagaaatcttgtgtcaaaagtatgaaagacataaaaatcagactctactccacactggccattctccttccatagtagtacactgcaatctgatttagcattgaaaagctagagctgagtcagaggtgaatcatcatatagtagaagtgtgaatacctgatgtcaggaggaaattgaaggcaagcgattgtagaagtttattttgtaaaaggaaggagataggtatgtatgtatctttagatacttttgagaaattatcttgtcctccagaagaattggttgcaaatgttcacatctagcttggatagcaaactttggtgggaagaccttgaatcattctcagtagagaagtagacaccgtgtgacctctaagattccttccaactttaaaaactgatgattctttatgtacttacctactctttctctctctccctccttccctccctccctcccctcccccacnnnnnnnnnnnnnnnnnnnnnnnnnnnnnnnnnnnnnnnnnnnnnnnnnnnnnnnnnnnnnnnnnnnnnnnnnnnnnnnnnnnnnnnnnnnnnnnnnnnnnnnnnnnnnnnnnnnnnnnnnnnnnnnnnnnnnnnnnnnnnnnnnnnnnnnnnnnnnnnnnnnnnnnnnnnnnnnnnnnnnnnnnnnnnnnnnnnnnnnnnnnnnnnnnnnnnnnnnnnnnnnnnnnnnnnnnnnnnnnnnnnnnnnnnnnnnnnnnnnnnnnnnnnnnnnnnnnnnnnnnnnnnnnnnnnnnnnnnnnnnnnnnnnnnnnnnnnnnnnnnnnnnnnnnnnnnnnnnnnnnnnnnnnnnnnnnnnnnnnnnnnnnnnnnnnnnnnnnnnnnnnnnnnnnnnnnnnnnnnnnnnnnnnnnnnnnnnnnnnnnnnnnnnnnnnnnnnnnnnnnnnnnnnnnnnnnnnnnnnnnnnnnnnnnnnnnnnnnnnnnnnnnnnnnnnnnnnnnnnnnnnnnnnnnnnnnnnnnnnnnnnnnnnnnnnnnnnnnnnnnnnnnnnnnnnnnnnnnnnnnnnnnnnnnnnnnnnnnnnnnnnnnnnnnnnnnnnnnnnnnnnnnnnnnnnnnnnnnnnnnnnnnnnnnnnnnnnnnnnnnnnnnnnnnnnnnnnnnnnnnnnnnnnnnnnnnnnnnnnnnnnnnnnnnnnnnnnnnnnnnnnnnnnnnnnnnnnnnnnnnnnnnnnnnnnnnnnnnnnnnnnnnnnnnnnnnnnnnnnnnnnnnnnnnnnnnnnnnnnnnnnnnnnnnnnnnnnnnnnnnnnnnnnnnnnnnnnnnnnnnnnnnnnnnnnnnnnnnnnnnnnnnnnnnnnnnnnnnnnnnnnnnnnnnnnnnnnnnnnnnnnnnnnnnnnnnnnnnnnnnnnnnnnnnnnnnnnnnnnnnnnnnnnnnnnnnnnnnnnnnnnnnnnnnnnnnnnnnnnnnnnnnnnnnnnnnnnnnnncctccctcccctcctagggcctcactgtcacccaggctggagtacagtggtgtgatttcagctcactgcaacctccacctcctgggctcaagcaatcctcccacctcagcctcccaagtagcatggggccacaagtgttagtgttctgttcattaagtaaacactgcagattctaataaccgcaagagataattacaagcctttctaaatttatcaaaagtttaaaaatgtaaggctgggcacggtggctcatgcctgtaatctcggcacattgggaggttgaggcgggtggatcaattgaggtcaggagtttgagaccagcctggccaatgtggcaaaaccccatctctactaaaaatacaaaaattagccaggcatggtgacgcacgcctgtactcccagctactcaggaggctgaggcaagagaatcacttgaacccgtgaggtggaggttgcagtgagccatgatcgtgccattgcactgcagcctgggtgacagagtgagactctgtctcaaaaaaaaaaaaaaaaaagcttaaaaatataattaaaagggaaaaaagcctctttaggctgaattatyaagatttattgtgcttcaatttgaagttatatggaaacatcatagtaatttaaagtatgttattgcttttacttggttcagacatcggaagaagttttttggtttttagttgtttgctttttaaaggccctttcttttcctcttccttacaaaagccatggtggcccagagtcagggggcagaggccctgagtaggattagaagtgtgtccaaatgagaggatagccactgagcagggtgaggagggattcttaaaggggaaggtgggtaaaagggtaccttaggacctgcacctatcaggaaagcgtctgaaatgaaaaagtgctggtttctttttctttttttccatgaaacttcgatggtagaattggaaagaatctgtgtctttgcattgtggcccataaatactgagtgggcttgacttataaccaaattctaataggttgttgttgttgttgatgatgaaatggtgatattggccacattccttaaatcttgctgttgagtgtcaaaataatcagaaagttatctttctgctcttctatttagtacttcataaatgccaacagtaaattgtaacactgtggaccaaggcttattctagggaaggagacttgaggatttcccccagataggatacaatattctctccaaggatactgacctgaattttacacactaaaataaagacttacaccatatgtctaaaaatatagtgataatctctcatctatatgattataataatgggctttcattaatgttacttttttagttgtaaggaaataatcccagtacaaaagataattggtgttcctgtttacagaacaacgttttggagctgtggtcattatttgatttcctcatgccaggatttttgggtactgaacgccagtttgctgctcgatatggtaaacctatattagcaagtagggatgctcgaagctccagtcgagagcaagaagcaggtatgaaagagatataattataaccctgtgtaagtgaatataatttattcttaacttttttgaagccattttctctttaactattaacaggtgttcttgctatggatgcgctgcaccgccaagtactaccgtttcttttgagaagaatgaaagaagatgttttgcaggatcttccacctaaaattattcaagactattattgtactcttagtcctctccaggttagraatctcgtgtttatcattgttagtkgtatgtttattagcagattgttttgtatgagccacaaaactattgaataaaggggcttagcctttggctttatcagatgcagataaagcctaaatgatgtggatrtaagtttgagtgtatgcattttgaatatagcattaaaacaaaattcagtatcatagttgctttttaagtttttttttttaagagacagggtcttactctgtcacccaagctggagtgcaggagcacagtcatggctcactgcagcctcgacctccgggttcaagtgattctccagcctcagtcccccaagtagctgggactgcaggcacatatcaccatgcccggctaattttttaagttttgtagagactgggtcttgctgtgttgcccagggtggtctcaaactcccagggtcaagcagtcctcccaccttggccttccaaagtgctgggattataggtgtgagccaccgtcccagcctacagttgctttcttttgtgtctagttaattgaaaagattgcaaggtattaaattgctaaggaaataagccaatgtttataaaggccaaaaatctgcttctgaatgttgtcatgctgtcctcacaacattataggtattattaatccccatttttgcaaataaagtgacattcagaaaagttacatagcttggctatggtcatagagctaatacacaattgtgcagtgctaatggcttgggtgatttctcagaaacgcatcattaggtgattttgtcattgtgcaaacatcatagagtgtacttacacacacctagatggtatagccaattgttccaaggctacaaacctgtacagcatgttactgtactgagtactgtaggcagttgcaacacaattatatttgtatatctaagcatagaaaaggtatggtaaaaacacaatattgtatcttatgggatgaccattttatatgtagtccattgttgacctcaatgtccttgtgcagtgcatgactatgtatcagagctgagttttaaaccttggtcagtgggacctcactcattccctttgaagtattatttcattacctaaaaatgttcaaaataaattttgccttgtgcacagttctgattttgtacataaagaccattattaaaggaatttattktgagcctttccttgtacttttctaagaattaaatggaaactgttccttgtcttartaagacatggcctctgggtcagaattttctctttgaaaatttttttatgttctaggtttgtatgtgtcagtctatcttactattaggatttgattcactacggtcaaatgaataagagatatacatacccagaaacttacttttcccccctccattgtatagatggttaacctgttaacaggtattcatctattcaacttgggcaggataagaagttgagagttctttgattcttctgtactatctgcctcatctctcaggtccctcttccttcatttgcaaaaattaatatttcttgaaaggaatacatttttgaagtaatgaaatgaagacttcttaaagtaggtacaataaggaaaagatgtcrtgtgaaaaaaatctgtggtgatttactggttgtggtgctgtaacataggcataaaatgcatttaagtaatcaatctagagaaagcgagctccaaagagaaatggcattttggctttgtttagcattcacagattttttattctctgatttctgtcctttagctctctagattttcttttctttcacattattttagcttgtacaagataggaacccagaccccagcgtagtactttaaaacttgacatatgttccccttttaggctagcagtaacattcttgtaaaatttggtgtcttgaaacatacatacagggtcttgatcatgtaacttcatttaaggaagatttttctcatttacttctaagagtttctttttttcttttttaagactcaatttttctaagattttcttttactggtaatgtatttattttcctgaacagtagaaaaattgagtcttggactatttgacttgtatttttcatattttggcagccgaacttaatgtgttcatacttgttttctaaatgtaattttaaaggaatttaccaagatggagtggataacctgtaattcctrtagtgaattagagatatcacaatttgttttcattaatgagggctgatttaaattactgctgttattggcctttgctggttatgtgttttgaacarttgaaaataaatatacttaaagcttctcccacgggggccattttacaggttcagctctatgaagattttgctaagtctcgtgccaagtgtgatgttgatgaaacagtttcttcagctacactttctgaagaaactgaaaaaccaaagcttaaagctacaggccacgtattccaggtatagattacattctacttttttttttttttgagatggaatttcactctgtcatctaggctagagtgcagtggcatgatctcggctcactgcaacctctgcctcctgggttcaagctatcatgcctcagactcctgagtagctgggagtagaggtgtgcgccaccatgcctggataatttttgtatttctagtagagatggagtttcgccatgttggccaggttgatctcaaactcctgacctcaagtgattcacctgtcttggcctcctaaagtgctaggattcaggcatgagccaccacgtctggcccatcccactttttaaatgttgaataatgatttttaatgaggcactttttatatggaataataaaatacggatctatgtatatttgtttcaatattatgtatacattcttgaaaataagttaaaatacctatttaatatatcttaataagcactttaatattaaaattaaatgtataaaatgcaatatatgtttgtatattacatgaaaagaagggctttagaatagagaatcttttgcttttttattcaaaaaatattagaacacctactacatggcagtaatttttcaaagctctgggattacttaaaacagcagataaaacagactccttcccttgtagagatgaaaaatacttaggtatatattatgtgtaagacaaagccaataatgtggttatagtgtatcagagtccagggtaggttgtggtttcttaatcgaggggctagggactgcctcactgagaaggtgacatttgagcaaagatctgaaggaggattaagtcatgcaggtgtatggggggaagtgattccaggcagaggatacaaaaagtacagaagtctcaagtcagatcatgcctcatatgcttgagagaatagcaaaaagaggtggcaagtgtcactttatctttccctcttgaatagtccaccacagaaaacctcctgctaatagattaagtactgtagcatttttaaagatataagaaggaaaagatagttgtgaagatctagtttttgttttgttttgttttgtttttttaagagaaggggtcatgttttgttgcccaggctggagtggtgggatcatagcttactgcaacctcaaattccagggctcaagcgatcctcagcctcagcttcctaagtaggtaggactacaggtgcacaccaccacacctggctaatttttaaaaatttttttagtgataaggtctcaccatgttgcccaggctggtcttgaacttttggcctcaagtgatcctccctcttcagcctcctaagtagctgggattataggtgcaaaccactgcacctggcctctcccacaagttttaatcctagtgctcagcactgtcttgagccttgccaatggagcttactaataaaacatctgtgtgccaaggctgagacccaaatcttaagccaagtaagaggcagaagagaaagtgtggctgaatcagagaagagaccatataaggttctgtttcacaaacacaaccacttgagacagtccccttccttgctcccctcctctcatctactgaatcagaataatgtgtagaagggagagaatttcaggtttataaggtcctcaagaattttttttttaaagactgagtctcgctctgtcacccaggatggagtgcagtggcatgatcttggcttactgcaacctccacctccagggttcaagcaattttcctgcctcagcctcccgagttgctgggattacaggcacatgccaccatgcctggctaatttttgtatttttagtagagacaaggtttcaccatgttggccagctggtcttgaactcctgacctcaggatccacccacctcggcctcccaaactgttgggattacaggggtgaggcaccatgcccggccagaaatttttacactcactgaagtttgagcaacttttgtatccaaaatgatccctggttccagaagcatctgtctgcattaccaggtactttgagtgggaaagggttttaaagaaaacaactaagacgctcmatttgccatgggaagctcattgtctggtgggggagacagatataaacagtacaatttatacgcgttgtaaatgtccgcatagaaactgcacaagaatctcaaatgagacatttgaactggttcttgaagaatgagtagaagtttgccgagcaagaagagggagaaaggcattctaaacagcataggaaatagcatagggaaagatacagagataaaaatatttgtgatatgcgaaattgactcatatatactttttttttcctcttgaaggcattacagtacttacgtaaactgtgcaaccatccagcattagtcttaacacctcaacatccagaattcaagaccactgccgaaaaactggcagttcagaattcttctctacatgatattcaacatgcccctaagctctcagctttgaaacaagtatgtatgtcttttaagtgttaaatgtgtgttgtaccccaggaatataaattcttggtaaatttgcttttcttaaagattactactgtgtttaccatttatttttaaatttggttaaatttttgatacagctttttgtaaaaatgtggttaaaatatatacagcacaaaatatgccattttaaccattttaagtgtgtaaatctgaggcattatatttacaatgttgtacaaccatcagcattatcttactgctaaaatatttccaccacccaaacagaaactctatattcatcaagcaataattcttcattctcccttgttctagcccctggtaatctctaatctactttctctatgaatttgcctgttctaaatatttcatttaagtggaatcataaaatatttgtcatttgtggcttattcattagtcagttttatggatatagcacatttcattcatccatttctgtgtcagtggacacttgggttgttttcaccttttggctattatgaataatgctgcagtgaacattggcttacaagtatctatctgagttactctttttagttcttttggctagagactaaggagtggaataggtaggtcatacagcatttctatgtttaacattttcgggaactgccaaactttttcacgatgactacaccattttacactcccaccagcaatgtaccagggttccagtttcttcatatccttgccaacacttgttgatttcttttaattatagtcatcctactaggtatgaagtgataactccttgtggatttgatttgctattccctaatgactgatgatgttgagcatcttttcatgtgcttattggacatttccatatcttctttagaaaaatgtctagtcaagttctttacccattttgattggcttatttcaccttgttgagttgtgaaagttttgttttgttgttgctgttttttttttttttttaatgggggtctcactgtgttgcccaggctggtcttgaactcctggcctcaaacgatcctcccacctgggcctgccaaagccctgggattataggcatgagctaccacaccctgccgagaaattctttataattctggatattaaacccttatcagacatatgatttgcagatattttctcccattctataggttatctttttactttcttgataatgtcttccatggtttctgatgagaaatcaggtgttaatcttattgaagatcccttttacatgaccatttgcttttttcttgctgctttcaagrttctttgtctttaaacagtttataattcatgtcgatgtggatttctttattttacttggaactgcatactctatcattttgctgatgtcaccctcttggtgttgcttttaaaaattaatttttaaaaattctaggatttcaaaagattaagggaaacaatttcaagcaccaaaatgttagcactatgccatttagttctaactacccttataaacgaagattttattgtaaaatctagactttagtarttgttttagcttgtggtcagtagttattctggcctaaagctcattgagaacaactaatgaatgaagattttagattccacataggttagtgtggaaaatgttatctaatagtgtatctggcatatatatccaaatatgtatccttacatcactaaacgtaaaatggactatgaactttcacactgtaaaactgaagaatgattgttacctttagatatatggaatggttttcttgtttgaccaaaccttgctgtaggtctttatatagaatgttcatggttttcctaacatagctagtatattaggtaaagctgtaagatatacttagtcaaggaatcctctaattagatctattttcaaaataaaaattgaatttcatccatatttgaattttacataggttcttacagattttttttttcccagcagttgctaattacattgatctcttattttagagtgtgcttcttgtcaccctgacacatctcgaattaagatgcttaggaagtctgcaacttaaagaggcccagattttttctggctgtcctcacggaagacttttctagtagccttcttatccattttcttggttcttttcagccagagtgaaggttctgtctcaggaaggataaatttattttttaaatctaaatatgtatatgctgtgaagttagaggagaagtcttacttgctttctaaaaatctgttggtagaaacatgtttatcagcaagtagtgctgggagaagtatctaatattgccaaagctagaatgaaaaattccaggaggctgtaatgaagaactaaaactgtaggtgaaattaatggagataagcagagtcagttttaaaagaaaacacttaggtgtattttgactatgtgagacttagcaaatattttatatgaggcaaagttgagtttgatttgatggcaaattcactataagaacggtgtgaattagttgccagtaaataaaactaataggatcttggctgggattaataactatataacggccaaaatgggggcatcatagtttcactgtatttcatactagtcagaacaaatattgagttgtttttttttttctttttctttttgagacagagtcttgctctgtcgcccaggctggaatgcagtggcgcgatcttggctcactgcaagctctgcctcctgggttcacgccattctcytgcctcagcctcccaagtagctgggrctgtagatgcccaccaccacgcccggctaatttttttttgtatttttagtagagacagggtttcaccgtgttagccaggatggtctcgctctcctgacctcatgatccgcctgcctgggcctcctaaagtgctgggattacaggtgtgagccaccgtgtctggcccaaattttgagttttatagttttgaccactacaagtggaagatcaaaatggtaaaacatctagaagccatttaatatgaggaatgattgaaaaaacgggtaatttagcctatgctgaagttagggcaagataaaattgaaatgctctctggggtgtcagctgacctctcaaacacccattattagatggccttggtaaatatttgctagagtctagtaatcaacttttcaaggccctgaactcgatcagtctctcagagcagacttgggttatagattagtgagaataccagagtatcaattctgctaccagacagagatacttaygtcaaatgatatgtccacatattcagtaggatagctgcaccagggaaagattacattaggaagaatgtctggtaagtatggtcttggagaagtcctagttggatattcttaatataactggttatctttaaggttttgacattgctgcctatggaactgagataattgagtgtgcatgacacagacattctgataaaatttcactctctggaactcttatgggatctgtataggatgtcacacttataacactttttttttcttctcctagagagagggtcttaccctgtcactcaggctggagtacagtggtgtggtcataactccaacctcaaactcttgggctcaagcaatcctttcacctcagcctcccaagtaactaggactacaggtgtgcgctaccacacctggctaattttgttttgttttttagagatgggatcttcctatgttggctaggctggtctggaactcctggcctcaagcagtcttcccacattagcatcccacagtgctgggattataggcatgagtcactatgcccagccaatatacattatttatactgcgtaccacatagtcacgtctctcctgagacaccttagataggactttttaraagaaacagctgaatagtaatttgatcgcagatttaaggcaagatgtaggggtaattacatcgatcagacttgtttatttggaggaatgtctccctagtataccatattctactrtataataaaaatctcaaactttaagggctgttaggtagaagaatgagaacatgtgttcttcctcaagcattgaattgtgacaatagatgtgaaatgttgtctaccagggaagattattagagattcagtacccaaagtttttactgggggctggtcacatatactccctttgcctagcatggatcaaaattccagaccctcagaaggcaggtttcagcctaaatcatattatttgcacagtagtttaggcacagtaaactatcattaccagttagggactgatgggaagactcctaaaatccaggttccaaatttcaaccttacgaagaggactttctgaggaaaacagtgtccttttctatacaacatcctaagtgttttacattgagtttggagtttgcctggatggccttttggttatctttcctatcagagcttttggtgttttgagtaacttctgttagtagaaaggagaaatcatcctgcatgaagatcttagattggcccggtacagtggctcacgcctgtaatcccagcactttgggagactgaggcagatcacctaaggtcaggagttcgaaaccaacctggccaacatggcgaaaccccatctctactaaaattacaaaaattcactgggcgtgatggcaggcacctgtaatcccagctactcaggaggctgaagcaggagaatatctcgaacctaggagttggaggttgcagtgagccaagatcacgccactgcactccagcctgggtgatagagggagactctgtctctaaaaaaaaagatcttagattttgtttttgcaacctccgccttcagggttccagcaattctcctgtctcagcctctcaagtagctgggactacaggtgcatgccactacacctggctgttttgcatttttagtagagacaggatttcgccatgttggcccggctggtctcgaactcttgacctcaagtgatctgcctgccttggcctcccaaagtgctgggattacaggtgtataagcccccactgccggcccagctcttagattttgaacagagttcagtaatagctcaaatactatggatgaagaagagtactattgggtatactgtttgtcaaattgatctaaacatgattctcttggattttattcgctcatttattaattgcacttgctgtgtgcaaggcaccgaaccactttaggaataagtataaatgatctatagcaaaatgtggtttctgccattaaagatcttggtctacagatagagtaataagctgtcttgtcaagaatccacatctagctaaatgcttcttttctataattttttctaccaaatgtggctgctccattgttttcttcatacattattgaataaccctttaggaaccagtttgtctgcggcatcttctttgtcattactttcaataaacatttattgaggctttagtctcaaggattgaggaaaaggaaggtaggtttgttattagataaacttctgggccgggtgtggtggctcatgcctataatccttgcactttgggaggccgaggcaggagggtcacttgagctcaggagttcaagaccagcctgagcaacatagtgagatcttgagtctataaaaaaaattaaatgaaaacttctgaagaggtgatcagggagctctaagcctgagcacctcaaaaactagttcagtgtgctgcagggtgacagattgcagcccaaagtgctaatctgctttccagatttcaggtacatttaaccttttcttgccacagagaggaatgtcacagtgagattagttttctgcttttattgaacgcttatgtagtttttttgttttttttttttttttcttcctaagttgctgttggactgcggtttgggaaatggcagcacttccgagagtggcacagagtctgttgtggcccagcacaggatactgatattctgtcagctgaaaagcatgcttgatatagtagagcatgatctcctcaaacctcacttgccctctgtcacttatttgagattagatggcagcatacctcctggtcagaggcattccattgtttcccggtaagtggcttctaagactcttattcataaataaatayattattacttacatagaagtttgccccatgaaatattttcattggctaaatatctgcaaatgcatttttttaattgtgtaattcaccccaaataaacccctttttaantatagaactacataaatataatcgaatagattatttgcttagcatatgaaaagggtgtgactgtaatagaaaagcactctgaagagcatgaaagaaatttaaggcatcaaccaacagtaaggataactactttcccccttacctttttgggagaattagggtgagaggaaccaaacaagtggcttagctaaaatctccatcctaatccctgtttgtgcactgagaacaagttggaatctggcccagctaggaagcagaactggtgagtgcagtgttcacatgtggtctgcagcctctacttttaaaatctcagtggttgctttttttttwwwwaaaaaaatgcagattcctaggttctgcttagtcccaaagctgctgacttcaagagtagccatttttaacaagcatcccagcygagcgcggtgactcatgcctgtaatcccagcactttgggaggccaaggtgggtggattacttgaggtcaggagttcaagaccagcctggccaacatggtgaaaccctgtctctactaaaaatataaaaattagctggatgtggtggcacatgcctgtaatcccagctactctggaggctgaggcaggaaaatgacttgaacccgagaggcagagttgcagtgagcagagattggattgggccactgcacttcagcctgagcaacagagcaagactctgtctcaaaaaaaaaaaaaaaaaaaaacaagcatccctaagagatcattaggcacaataaagttagagacccggggagggactttggaagccgacaggctcaggtttgactcctggctctgctatttaagcagtgttctcttgagcctgtttatcattcacacagcctcagtctctctaaaatagggatattggtaataatacccttatagagctattgtaacaattaaataaaataatgcatataaagtacaaagactattgcttgacttgtagtaaggataataaatcgtagcttggtagctgctatttttaatgttagttttttctttttcctagaagttactagatatcctttgtcagtgtcttctaggactagtacagtagtagcaaccctaacactctcaccttctgtcgtccctgaatgaaagtctagcctgttctcacacttctctgtccccatactttaaaggttcatagttgggtttatcttaattataattagcatttaattatatttttgcaagttagtccttacctgatgttactaaattcaatgcagtttgccttattttgtatttatgaaattcctgamtagctttggaatgccctcttttactaaaaacgttatacatattgagaggatatttttctcagatgatcatgtaagtatccctattgtggatttttaaagcagcattttcatttgtgctctttaatttttattaacagtttctgttataggacttaagaatggacyaattttatttttgttatctacttttaggtttaataatgatccatcyatagacgttctgttacttaccactcacgttggtggcctgggacttaatttgacaggcgctgacacagtagtatttgtggagcatgactggaatcctatgcgagatctacaagccatggaccgggcccatcgcattgggcaggtaaaagtcaattttacctcacagatgttaacctgtgcatgaaaatatmctcccccagaaagataggaaaccttggtttagttcttgctctggtgttaacatacatgtgttatgaccttggacagatcacttaactcttctgtggtatcacttcctcatgcattaaatgaggtgctagcacttaggaaaacctggatcactgttcatccctaatattctgtgattgctgcacacattttgagctcatgtggccagacaaaataaaaatccaaccctaattaggtagtataaaatagtacaagtctacaagccctctgactcgttggaacctcaaagcataatatgtgttacggttgcttaactgtttttcttatccagaaacgtgtggttaacgtataccgattgataaccagaggaacattggaagaaaaaataatggggttgcagaaattcaagatgaacatagcgaatactgttattagccaagagaattctagtttgcagagcatggggactgatcagcttcttgatctgtttactcttgataaggtaaagaacttacacaatttgttgtatctttgagtcacaggcttcctgtgactgctaagttgaaagtattaaaggagcagcaaaatgcgtttactttagtatccatgagatcaccactggagggaatttttggtgcctagataaattctgcagcatactaggggatgtgtgaagttttgatttttttttttcattgatgtcttcagtgtcttgccacaaggtttctttccttagtccttttctgctaaagcacagcttatcactggagtcagtaagactcatgggtgagagttcttggccctgcctcctgttaactggttaccttaggcagattatctctctgagcttctatacctattttactacatggttgtgakgtaagattatatatgtaagcagtcagaaaggatatctagtgtagattctcaataaatagtagccattgttattgcagatgatggaactaatacatcagataacaatctataatcaaaaggatgcaccacttggaaatattagtgagtctaatattgtaaaaccaatatagttggatttaaagtcctacataggttcagaaaatccactgcatacttagtataaattatggtggggtatatgatgattaaaactagctgtaataacagaagtgtactttcaagtaagagaaaatcgttctgccatactatgtgtatgttaaaccacatttgaaatatgtctagtttggggagctacattttaaatggtaacaaattaagtccctggtggccagaatggaggcaggttcttcaatcatgtcatattgaaagtcaagataaagttgaaagaatgagacatgtttaacatagaaaaaagaaggctcaaagaaacatgcatagccgtcttcaaatagcttttattctgtttgaaggaatattcttatgggtgactttcagtgaccagaactgggctcagagggatattttagggaaatggcctattgccataaaaggcactatttagacaattggcagaatttgaaaacagactgtatattagaacattttaatatcagtgttagatttccttaatctgatctttatatggttatgtaagagaatattcttgttcttaggaatacatgctgattcctctcaaaggataaaaggacatgatgtctacaactttctttcaaattgttcagagaaaaaactgatatctaactatatttctgacatccatatatacatacacatatataaatggggagagagaatgataaagcaaataagttctttgttatgttcttataattcttccataattttgaagttctttccaaataaaaaactgacaaataaatgtatttggagatcatgaatttccccatcacttgaagtactcaattctgttgaataattgtattagaaacaagtgtgattttaaaggaaaatacaatttgtgaagttaacctctcattttattttttttttttttttgccaatttttcttaaggatggcaaagcagaaaaagctgacacctctacttctgggaaagcaagtatgaaatcaattcttgaaaacctgagtgatctttgggatcaagagcagtatgattcagagtacagcctggaaaattttatgcattctctcaagtaactatcaaatattgtaaatgcaattgctgctagttcagttacatttctgctgatattcagcaaatttctaagtttatggtgaacttttaactcaatgtgtaaatagatctggagaatattcagcataatgctggctcttgtttcactgggggaaacaagttattctcaaatatttgcactgtattaaatttaaatgttaatgtgaaatggtttaaattttacatgctgaaaagctgcagagcagaggaaccaaaccaggtttatttgtgctaccaggaggtgttcttaatgggaacaggcctcctatctttagtcactttgtacaggatgatatccatgagtactttagtgtttgtatatgttttttcttttaaatagaacttgtttttataattgatttaaaatagggctttttttctataaaagccttaatgagccataattttaagaatataagaataatgactatgatattggtcagtcttagaacatgaaaatgtcagacaatgaatttaatcgggcccttggtggaaacatttatatatttaatgcagatgcatagtgtttttcaaatcttyaacatcattttttcaacttttaagatataatatcaactattctaaatacaggtaatggtatatttaaggctaccataacatcctatttagagggtggttttttttaatttatctaatggctacgatatagccagattcaaataacatatgtactcaataggtttcaatcatatatataatatattttttgtaactatgaacatacacagttttccagaaatagattttacactgtttagaattccaacacctacagtggaaagactgtttattgtagtaatgcatggctgaagcataaaagggagagagaatttctttatatacacaaacatacatgaatatgcatatctatatgcatagatgtacctatcctgcacccaaaaaggtgcctggtattggcactaaaatcatgtagttatactgggcagcaataataattgggcatgaggctgattactcaatggtgagggtaggtatatgtagatagatgtgcatgtatgtgtttgtatatataattttataagtttcacgcataaattaatacatgcctgtgtgcatacatatgtatgggatatatttgtatatatatgtacaggtaataaacatccccaaggtttgtggctggccatacacataggcatcagtttaacaaccatcagacctcagctgtacaataacaggtgttttgtttaattaaaattatactgttctgcagcatttagacatttgtcacatttcattagctttgacaaccatactgtaacattaaacctagcattccacaagagaataaatataagattgaaactgtaaaatatatgcaactgtgtgttatttgtaggaaatggtcactagaaagagcaaaagattattcaggtatacaggttttttttcattgtttaggattttaactcaaaactttatgtagaacatttcagtatatttgagttgaatatttttttattaactatttatttgctagttccataaaccagctctttaacatagcttatagtaattgatattttcttagaataagtacagagcaatatatcattaaagggctatgaaggggcaaaagaaatcacaccataaaagttagtactttttcccaatctgaaatgtcagatagagctagaagtcagatatttaggctgtttaaactttctgagagtttaatcaaaaggtgtgtatttctagaaggatgactagaaaaatgatgtgtggttgcttctgaatgggaaacaggagtcagggctgacaggaaaacttagagtggctataacatttttaaaataatcttttgagttgtaaaatagtaaatcacacattccaacttttccatagaaaggaaaacatgtaaacaggtaagaactaagtattcttaattaaatgacccagtcattgtagtacatcttaagaataatgaagagatgtggagaattgaactgagtaatgaatgatattaaagaactgctgtcaatttcatggatgtgatgatttggtagttttttcaatgtatgggtgtgggaagtcaaacaagcatgatagaatgttaactattttaaactgggaattgggttcatagatatccattgtactacttcccttggtttttgtgtctttatgataggaaatagcaaactgttaaaaatatagattcagagattattagtcttatcatttgggtttcttgtaggaaaatcttaacatttgggggcctgggtataatttttgtttcatatattcactcatatatatgcttattgtatatgcttatttattctacaaacatttctccaaaaagtattctagtgaaagggtaaaagtctttgatgttgggactgattgaactggtatagccttattccttctggatggtttatatgaacttacttattcaaaagtaaatattccactgaagctatttgagaatgtgatcacttatagacaaaagtggaatttgaacataatagaaattatacaaaagtaacaagcactccatcacacatctgttctaaatatttaatcctaatagaatcttctatgtcctgcagacctcccatgctggcaccagtggagtctaaagtgaaattgggctgggcacggtggcttatgcctatgagaggccaaggcaggagaagcacttgagcccaggagttcaagaccaacctgggcaacatagggagatcctgtctctacaaaaaaatacaaaaattagccaggcacagtggcatgcttttcttgtcccagctactcaggaagctgaggtgagtttgaggtcgcagtgagctacgacttcaccactgtgctctagctgggtgacagggcaagaccctgtctcaaaaataataataataatgtgaacttgattgcaggtacacctgttatcagatgctagaggactcaagtgaatcatcaagtgaatcaataaaacaaaaacttgagttatatcaattaatagaaaatgtttcctctttatacacagcattttctttttttttttttttttttttttttttttttgcgatggcatttcactcttgtcgcccaggctggagtgcagtggtgccatcttggctcactgcaacctctgccttcagggttgaagccattctcctgccccagccctcctgagtagctgggactacaggcacctgccaccatgcccagctgatttttgtatttttagtaaagacagggttttgccatgttggccaggctggttgaactcctgacctcaggtgatccacctgcctcggcctcccagtgttgggattacaggcgtgagccactgtgcccagcctatacacagcactttcaaccaccatctgtaaagagatacaaagtacctcctgcttcaagaaagggttcctatgaatctataataaatccactaaaaccagtgaagttccattaaatataggggctgagatcctaatttccatgtagagacaaggagaattagtcccctccataaacctgcaaagagatcacatattcaagtaggactagatccgtgagcacacacacaaagttatctatatgaaatcagaatcccaggcctttaccatgggtgtaagtgtaaggtctgggtttatgctaagtgttttatactgtaagaaccacaagtcaagaaaataaaatcaattctggcaccccagcagaaacaaatacaaaaactgccctttagggagagtttctaatagggtcccataggattatcatagaaggaaagattaagcctacatacataccatctacaggaggaaaagccagcagataaaagtagaattctttaagaagtacaaataaaataaatcataaaacagataggaaaatactatgaaagattagacatttgaaaaccaataaatgagaaacagttctcaatgcattttacacacatttgaagagagaatttgtgaactggaatgttgaacaagagaatcttgttaggaggtccagaaggaaagggagatcatgggaacagagacaagtcactcttaggactattttctatatgcccctgcatctaatccatcaacagtttctaccatctctagctacaaaatatatttcaaatctcttcacctgtcttcatctccactgctactactgtagttctgtgataccgtaacttgtattaacctgattgactctctcttagctgagaaagccagatggattccatttggctccttcatttgcaagacattaagggctccttacccacccccttcctcaaggacttaacttgtgcaagctgactcccagcacatcaaagagtgcaattaactgataaggtactgtggcaagcaagctatgtccacagtgcccaggaatttgctcaggtgatagtactctaaagcccccgcgtttgtgtccagcagatatcacccagagcccccacacctatcaccttgtgatgaatttaaagcccctgcacctggaactgtttgttttcctgtaaccgtttgtctttttaacttttttgcctgttttacttctgtaagattgctacagctagggtccccctcccctctctaaaccaaagtataaaagaaaatctagccccttcttcggggccgagagaattttgagcgctagcctgtctctcggtcgccggctaataaaggactcctggattagtctcaaagtgtggcgtttctctatgactcgcttggttacaacttttcccaccaccaccttgcctctcctagactactgtcatcttactggtcttcttacttgccgaatccaccagtgtcgtcctgtcatcttcagaccaaatcaaaattccttactataagccctacaagttgtggcccttgcccatccctctgactttgtctcttgtcatatcccactatgtttacctccaatcaagtcagtatgtcctccttgctgtgcctcaacataaaaccacatgtgtttccatcttagttttggttctggtacagctgggtaaatggtatatgtattatgggagagatggggaagactgaaaagggagtattaggggatgggtggaggtggaaagtaggaagtcaagaattctgttttgttcatgttaaatatgaggtgcctgttagatgcatcaaagtaaggatacagagtaggtaggcagatataggagtctggaactcaaagaaaaggtcaagactagagagagaaatttagaagacagtattttaaggtatgggactgcatgagagctcctggggtttacttatataatgggaatcctatagagcagtaagagtcaatgagtaactaataaaacgttgaatctcaaaacagcagtgagtttttaaaaagtatactttgagtccatttagatgaagatcaaaaacaaaatattgtttatggctgtacaaaaacaatcacacatatggttatttcacattttaagaataaaaattgtcagtcatatgaacatttactgattgtttcctactatgtactagacacagtgggagaaactcaaagacgagtgaggaaggaggatactgcagccaacagttggcattgttacattaattttagaaaaagtagccttcgggcaaaaagtattacttggagtagagggtatctcctaaagataacagattcaggcacagacgtggtggctcacacctgtaatcccagcactttgggaggccaaggccagcagatcacctgaggtcaggagtttgagaatggcctggccaacatgacgaaaccccgtctctactgaaaatacaaaaaattagctgggcayggtgctgcaaacctgtagtccccagccacttgagaggctgagacaggagaatcgcttgaacctggaaggcggaggctgcagtgagccaagatcacgccactgcactccagcctgggcgacagagtgagaatcagtctcagaaacaacaacaacaaaaaacatacatccaaaaaaaaaacagattcagttaaccaggagaataaagcaattctaaattaatacgcacttcaaaaacatggacaaaactacaaaaagaaatggacaagtccaaggtcatagtgggattttaacacacctctctcaataaaacaagtggaccagaagaaaacatgcaaaaagatatagacaattttagtacagtgaacaagtgtgatttaattgactcatatctatactcacatatataggtgtgtatatatgtgcgtgtgtgtgtgtatagagacagagagagagactttttttttttttttgagatggagttttgctcttgttgcccaggctggagtgcaatggtgcaatcttggcttactgctacctccatctcctgggttcaagagattctcctgcctcagcctcccaagtagctgggattacaagcttgcacccccatgcctggctaattttttgtatttagtagagacggggtttcaccgtgttggtcagtctggtcttgaactcctgacctcaggtgatccacttgcctcggcctcccaaagtgctgggattacaggtgtgagcc

SEQ ID NO: 94272 - DNA, 43082 bp, Homo sapiens
agggacgtggtgaacaaaggtgcagaggtggggagatgctgagcatgctcagagaatagtgagaagtccagtagaggagcaaaaagtgcagcctgggggtggggtggtaaaagggggcaaagtgcacaagatgggtggggaaccatggaggataggagccatcgtgactggataggcactaggtctgcaatgaccttgaatgccatgggaggtgtcagaggttttcaagcagggaaatggcacaacaggactgtgttcaagaagaaaactctggtagacacacaaagggtgaggtagagggggagaggttggaaagttctatgggacaaatgatccattttgtttgtttgtttgttttttgagatagagttttgctcttgttgcccaggctggagtgaagtggggtgatcttggctcactgcaacctccgccccccaggttcaagcgattctcctggctcagcctcctgagtagctgggataacgggcgcccgccaacatgcccggctaattttttttaatatttttagtagagacggggttttgccgtgctggccaggctggtcttgaactcctgacctcaggtgatctgcccgcctcagcctcccaaagtggtaggattgcaggcgtgagccaccgcgcctggcaatttttttttttttttttgagacagggtctcaccctgtgccttagcctcctgagtagctgggactacaggtgcatgccactacacctggctaattttttattttttgtagagatgggagcttgctatgttgcccaagctggtctcaaacttctagattcaatggatcctcccaccttggcctcccaaagctgagattataggcgtgagccaccaagcctggcccagtttttctttttctttctttcttctttttttttttttttaatttttatttatttaagagatggggcctcgatctgctgtccaggctggactgtagtgcactcatagctctctgcagcctcaaactcctgagctaaagagatcctccagcctcagcctcccaagtagctaggactacaggcatgaaccactgtgctcagtttgtatttcttgagaggacactgggttggacagttatagcaagatatctttaaagggctgagtgtggtggcccatgcctgtaatcccagcacgttaggaggctgaggctggaggaccactttagctcatgagtttgaggctgcagagagctataagtgcactacagtccagcctggacagcagattgagaccctgtctctttaaaaaaaaaaaaaaaaagaaagtctttaaataattcaaagttaaaaccttgaaaaaggtccaggcgcggtggctcacgcctgtaataccagcactttgggaggccgaggtgggcggatcacaagatcaggagatcaagaccatcctggctaacacggtgaaaacccgtctctactaaaaatacaaaaaattagccgggcgtggtggtgggcgcctgtagtcccagctacttgggaggctgaggcaggagaatggtgtgaacctgggaggcagaacttggagtgagccgagatcgcgccactgcactccagcctgggtgacagagcgagactctgtctcaaaaaaacaaacaaacaaaaaaaaccttgaaaaagttttaaaagctttaaaaatgattaactctaatagacatcaaagaaggtctgtaggacaataacagcaataatctgtaagtaggaaggtgtaggggagagtaaattggtttgaagtacagagcatataattccaacaaaggactgctatgcagcccacagccctatctgtgaggtaaggctaggctttaagttctgcatcacctgagagagtgattgcttaaaatgcccctactacctaagaggcagctcggcctcctgagggcatatgacccaacccccttcactatacttccaagacttcagtcttcggtcactttgcatgaacaaaggcagaaatgcactgagctttgctgtttgaaaatatttttagcaattttagtggtagaaaagatgccctttgatacaattttgtttttgatcttgtcttctttgaggaaggaaagcagattccaggccggatctgctgtttgagagtataataattgcctaaggccaggcgtggtagctcacgcctgtaatcccagcactttgggaggccgaggcgggcagatcacctgagatcgggagttcgagaccagcctgaccaacacggagaaaccccgtctctactagaaatagaaaattagctgggcgtggtggcgcatgcctgtaatcccagctactcgggaggctggggcaggagaatcgcttgaacccaggaggcggagattgcggtgagccgagatcgtgccatggcactccagcccctgggtgatagagcgagactccgtctcaaaaacaaaaaacaaaaaacagagagagtaagtacggaactgcatttacctccacacctataattatccttcttattatagggaagttctatgtctttgaactttattccaaatccaccctaaagaaaagtatggatcagctggacccaggaggcccttcccctggaccttgcagaaaaatgactgacaatcatgaaattcactaaaggctttaaggtacctatctcttggaatcccttttacaactccttttcttctagcttcggaatagtctaattatctttgtcccaggttttaggttacttgggcacattatttatgtgcatcgcaataatgtgatttcagtctatctctgtctccattctgcatagagaggtgtgacaaatttcctgtcctctgtgggctcacacacagctgcagtaccacacggaattacagtggaagtttgaacagtggagactgtgggagcccagtgcccagagcaacctactctactaagggagttgagaggatggggagctagacacgtgttatgtggatccagagccacttggtactaagctcttactccctgcaaaacacttaaaaaaaaaaaaaaagatcttaaacactacctctcctcccccccacccccgccttctttttgagacgagtttcactctgtcgcccaggctggagtgcagtggcgcaatctcagctcactgcaaactccacctcctggactcaagcgattctcccacctcagcctctggagtagctgggattacaggcgcgcgccaccaagccgtaactcctggaatcaagtgatcccgcgtgcctaggcctcccaaagtgctgggattacaggcattatccaccacgccctgcctcgcagagcactttcaattcatgcacaagcccttgaatcccaaacactcttggaggcagagactacttttattccaactttatagataaggaagccagggcactgtcaagggagttgcctggtgcctgtaagcagggagctgaactggtagttagaggaattgcaattcccaggctctggttcactgcgctacctccaggaatgggggtggaagtggagggagggggcggtgttgcaggaagtacatttgcttcaatatgaacagttaaaatgcctggaaacattaagaaagggagcgtgcaaaaaaaaatttccctggtttcagccatttctttcttttttttttttgggggggggcggagtcttgctctgtcgcccaggctaatttttgtattttttttagagacggggtgtcacggtgttagccaggatggtctcagtctcctgacctcgtgatccgcccgcctcggcctcccaaagtgctgggattacaggcgtgagccaccgcggccggcctggtttcagccatttctaacccttttttaggtcacttcaaataaaatttgcaaataactgccatgtggagaaaatatgcaaatgttgctaaacggaaaagtcattcggagtgctgtgaaagttggctcatttatttagctgcctcaagtgtgcacatcattctttttcaaagtgaatgtgtttaaagacaaagctttgtatgttttcccgcttcctctccaattggatattccaattataacgtattgattaacaaaataccctggtggtttgaaccaagtatgcctatgagcaggggttaattgaaaatagggaactgctgtatatttcaattcttttaggtactcccatggcggtaccctgtactcggctctactcaaaagtaaaacaaagcccagaaccagggtagtcagtgcatcccattgttgctatatgcagtttgaagagctgtcggaactcacagttttcgaacctgactcatgtttaccctggttcataggaaaacgaaactgaaacaaaaccgaggtccttcaccaaaactccatgagaatccacgaatctcagggcaggaagggaccctaatatcattaaacctagtggctctccaaggggcattgtagaaatctgtgtatttctggttgtcacaatgactggcgagagctactggcatttagtgggcaggagccaggcacgctaggatgttctatgatgctggtcagtcccacagagcgaataattgaatcactggacacatgtcggtgaaaaactagttcattatcatctaagcctagaactaacactgttttacatatgaacacaaagtatctttgcccagtttccatatatcctgaattttccacaaatgcaggtactgtttcaattgaaggaagattgtactgttttatttaaaaattattaatagttcatcattttggaaaatgaggttcctagtagcaatgctgctcatggaacttgagttgtgaaatcaacacacctttccagtttgcatttgtggctctactgggcaagtgtcttcccaccagttagtgtagctgtgcggcggcatttacatattataatacattgttttattataatcattttgctttcgtttgttgacagatcatgttttttgaaattgtgtttgtaggtttacataaacaatttaggttttgttatttcagtataggtaaagggggcgttagaaaatactcgttatgaaaaggagttgggtctttcacagggttatggaatgtagcagactccttttatagatgagcaaattgagacccaaagccgttaaacaacttgcccccgacagtgtgatattctctccctatctcgttcgaatttccgtctcgattttaaaaattgagaagggagagaagttatgtgtatagtaaattatgtgatgagcacgaactatttgaattctggcagcagaagaccttttgtgggggtggtggaaaccactgcgttttatttaatttcgtagggctgagggtcagaagagaggggaaagcggtcataagaaactacggatgtgcgggcgccggctcaaagccgggaatccactagtaaacaccttcttctatttaagggcctgcggcaccgaagccgggacttggggtggcctgcctaggagggaaccacaggaagaggttccaccgacggtagaaacccggttcctcctgttcctcatccaccgcagcggcctgagagtcaccccgagcccaggccggtaaccccgctgcagcccctccggcaggcccaggttgcaccggctacaaacattcccgacacccttgggccctagaagagccgttcgccacccgcggggtccccgcaacgccggtggtcaccggccctaagccgctgggcgccccgcgggaggaaactaggggcaaatgtagcccgcattcctgcggagagccggggtcccgggagggcgcgccagcggcggttccggatcagcgcgtgtctgtctcattgttccctcaccgcggggggcgggggcggaggcgcgcgcgcacacgtcggggggttggccaggaggggccattgtgtgtttctaggcggcgcccccgctgcctaggcaaccgcgcaggaaggtgtccggccacctgcgcgcgccgccggctcccctccatttccccccgactcccgccccggtcaccatcctaccctcctccctcctcctttccccttactccgctcccctcttttccctccctctcctccccttccctctgttctctcctcctcttcccctcccctcccccgtccggagcactctatattcaagccaccgtttcctgcttcacaaaatggccaccgcacgcgacacctacggtcacgtggcctgccgccctctcagtttcgggaatctgcctagctcccactaaggggaggctacccgcggaagagcgagggcagattagaccggagaaatcccaccacatctccaagcccgggaactgagagaggaagaagagtgaaggccagtgttaggaaaaaaaaaacaaaaacaaaaaaaacgaaaaacgaaagctgagtgcatagagttggaaaggggagcgaatgcgtaaggttggaaaggggggcgaagaggcctaggttaacattttcaggcgtcttagccggtggaaagcgggagacgcaagttctcgcgagatctcgagaactccgaggctgagactagggttttagcggagagcacgggaagtgtagctcgagagaactgggacagcatttcgcaccctaagctccaaggcaggactgctaggggcgacaggactaagtaggaaatcccttgagcttasacctgagggagcgcgcagtagccgggcagaagtcgccgcgacagggaattgcggtgtgagagggagggcacacgttgtacgtgctgacgtagccggctttccagcgggtatattagatccgtggccgcgcggtgcgctccagagccgcagttctcccgtragagggccttcgcggtggaacaaacactcgcttagcagcggaagactccgagttctcggtactcttcagggatgagtcatgtggcagtggaaaatgcgctcgggctggaccagcaggtgagccgcaagaaccccaccgggctggctgctgcgtgaattcctcccctgacctaacctggctaatggcgcagcgctaaccggcacccttacttttcattttctgggtgccccgggctggcgggtgtgagtgccccggggctatagagggataggaatgttggttggggctgtcgcccgggcccggtctcggcccgctgtattgtccccgggacgagcacaatggcggcttttgtgtgtgcgtgcgcaggcgggcggagggggaggaagtgcgcgcgctctcgcggggacgcgcatgcgcgaatcccgactgattagtgacctgggggggtttgcgggagtgcgcagcgcggcgggacgcgactggaggcccttttggcttggagggcttcggccttcacggctggcgcagcctggattcccgtccggaggacctggcggcacccggtgtttgcgtgcctgcgagcaaggggtagaacgcggcccaggaatgtgggagggggcggccttcgctcggggtaatggcggcggcctcttttgtgtggtgctgggcggcgctgtggctcacctccgggagacggcgggtctcgggcgggcgaaggcctggaaaggaggatggaatgggtttcttgttttttcccgggttccttccgctggctttttcgcttcagcccaggttccgcagggtccgggggccctgcgccgcagccggggaggctgcgtttccggagtggaaagttttgtgacgcagaagattggggaggagtgggggaggggtgggggcggggaggggaggcaggaattggccgctgcgcgctgggccctggagatagaggttggacgtggcggggaggttagggagccagcgaggccctttctcctccttgcttgccccagattgtccctgtgtggtatgttagccgggagtcccgcgttgtttttctggggtggaggggtcatcgcgggttgtggtagtgtcttcgtgttagtgactgtgatccaggaatccgccattggaaaaacacccggcttaggggggaagtaaacagttttgttgttgacttgttgctatctgtggagtagaatcttgcaatgggtcccaggcccccgggttttttctcttagccagaatcccctcttctaagggtttaggggcagaggagagaaagatgtgtgatttgagaggagaaggttatggactttggtggcaggaagtctgcatcccaccgcaacagtggcaccaggcttcagataagctcttgtgtgggttatgcggagcttttaaataaactactgtctactgtgattaggggagcgttgatttcacaaactccggaataatcctgagacgaagtttagtggcacaaattaattgaatacatagtttaatgtagtcatatgtaatattttttaggaattgatctgttcctttggaagcattttctacccgttaatgaaccaattatattaaatcctctaattgctgacacatgttgaattgaacagacactttaacaacctaccagcagcacagagtattcccagttttaccattttccatttagctatagtgtccttttaaggattctaggcaacagtgaaccttatttaaaaagcaaaattgtgctataacaagtgcaaaaggaaagtttgtgttcctaccgtgctttaaagtattgatggtagcaagagaaagcgcagtggtgtttttgctcatagaaattctggaaattaggtgcctgaagtcttacactcattttttaaaagtatagcatctgcttccagttttcagtgactccattgatgatgcatgcggtttggccgtatcatactgagctttaaacacaagatttataaacatggtatgtagtgcatcttttgcaaacaggttggcagcggtactgtgtgacttggtcttttgtggcttttttgagaaaaatgaaacactttgcatgtatagttttttctcccaactacttgtgagtagttcctggttataaaacgttatgaaggtagcacataacccttttctagaatgaagaggcttttgagctaccagtgtaaggggataggtagaaatagagatgaaaggcactaagatgtcctactctttaagagcattgaacgccagttgtgccatttattcaaagtcatctttgaacttatgttaaaatggggtaaaaacaggtaactacttcaggccgggctcatgcttgtaatcccagtgctttgggaggccaaggcaggtggttcacctgacctgaggtcaggagaccagcctgggcaacatggcgaaaccccatctctactaaaagtacaaaaagtagcctagcgtggtggcgcacccctgtaatcccagctactcggggaggtggaggttgcagtgagccgagatcacatgactgaattccagcctggatgacagagggagactctgtctcaaaaaaaataaaaataaaaacaaacgaaacagtcaaactacttaagagttgtgcttaacatagtgttctgtaagtggtaggtatattgctatttttttgttgttcttaagagtactacccgactaaaaatacttgggcaatatttagggatgaagtatctaactaaaagaacggccacttcgaaatttgtcctgacatttttcaggtgtgcattttaggtttaaaatatcaagtattacggaaagttggcattggaaactttcataaccggcactaaaacgaatcctttatctatttgacattgaggaataattttgagattcagtgtaagctttagtttggtgattagggagcctgtgctatggaacatgttagtgaaaatttattttgaatgcatgaattaaatttggacagtttctactgaayagcacaagcatcttggtgtgccgccttctgtagtatatacaatagtaatattgcatttgcttagagcattgcagacttgaaaacattcttagtcacattctcattaagggttggtattagccctgtgaggtggactgggcaactacttgaatgcagtactagcaaatgctagagggcaggactagttttctcttaatgtagtatttgagcacatggggtgctaaccatctcactctcttctagtttgctggcctagacctgaactcttcagataatcagagtggaggaagtacagccagcagtaagtacaacatcttgtgggtttattgaatattagagcttaacatcttaagatttcattgggcttatgtaaaatttaagaaatttgcctttcaattttttactgcttaaagaattatgtagtctttgtgttatagaattatgtagtacttagtgatcaatctaaagcatcgttgccttttttttttttttttggttgagatggagctttgctcttgttgcccaggttggagtgcaatggtgtgatctcggctcaccgcagtctctgcctccgggttcaagcgattctcctgcctcagcctcccgaatagctgtgcctttctgataataaaacatcaatgactagctggctctcttgagtaaaagcagctaatcattggaaagaaccttattatatcaaattatctctagaagagtttttgtccattataaatcctgagcccagtttagaggtgatgggaatgtgtccctgttaactgactatatttattaaattgaattaagggaatatgcatttcattggttatagctactcctttctcctgaagaacagaagactatactgaattttggattggtggttaggttaggttttcaaatgtgtcatttcttttaaaaaggcattagaaaagttgctttttttcttctaaggggggttatttagagacttgttagaggttagtgttaagataggggatcttggtggtttattataagggcaatagacccttatttttagctcagatctcttcctacttattaaaacaaaagtgagtatgggctatgatgtgtcctcatttttaggcaagaacagcttcactgggmacaaaacttggtgtttgctttaactttcaccttatttgtcatgctaagaatcttttaggaactgattgtcctagtagagatttttaaaaatatttaattcagtctagaagtgaaaaagaaaaatgacacgtttactagttataaagcaaatttatttggctttatgttgttttttttgcttatccatattctaggctgtactcctgctcgcatacagagcaactgtcaactttccttaaactcagcaagccccaaattaaaacctgcaattccttgaaattaactcccctttgcagcttttccttgtttatttattgtatgttttgcaacttactggcatagaaacaaaagattgtgagatatgttacatgagtaatcttaaattgttacagtaatacttaatgcttttgttgacagttttgatgacagttctcttaaatctagcaggcctttaaaaaaatcacattaaatgaccactggtggctaaatgtgctcaatttgtggatttcaactattaggttccaaatcagcttttttttatcaaactcctttcagagttctccttatgaagcagtaacccatttaaaattagattcttatttttcccccctctcagtgtccaggtaagtaatcagattggaaggctggagattttaatttcccagaaccrttttttagtaacagaaatttaaatgggaaggttttttggcatttaattaattttatatatatatatatttttttagaagggcgctatattcctcctcatttaaggaaccgagaagctactaaaggtaggtcctcacaagtaacttcgtaggtctattttttgcctcctttagaagttagtaaagcctaaggaaaaccaggcatttgggggaggtctaaacatggtgttgtttttctatgcttcygtcagccttggttcaaatactagagcttaataattttggaagaactcatctaatgttacgcagtgggaaattcggcattcctatgtcaaactgttctgacgccaagggcatggttttgtacagtttcactagtgttgtgctgaatctgtttgtaatcattcacagcatggttttagtttggaagaggtgggtgccctactgtgtaaaccaagctgtataatgataacaacctggttatttctgtcttggcaaagttgcyagaaatgaagatgggcttattgtagaacagttaacaagttacagcgttggaagtgattctctggtttcatctccttgccttgctgcttttgaaaggttttgtccaaaatgtattacaatatctggtgtcttttcccattgtaattgtaacgtagtgatagatgacagctagtatatgtttcatattatgagacagctgttcgggtgctttatattctgtaaaatagaccatccaaaatttggaggaaaagggaaagtcaggaaaaccaaagattaggagggaagatactgtataaagaaggcagataggaagagtggagagtccacaggggagcacatggtttgctgctgttcctccatctccatatgtagtctgtattaccttcactgtcctggcaatgcatggatataaaatctgtattatttctaccagaagatcactttggctttttttttttttttttttttttgagacggagccttgctctgctgcggaggctggagtgcagtagcgcgggctcactgcaacctccgcctcctgggttcaagtgattctcctgcctcagcctcccaagtagctgggatcacaggcatgtgccaccatgcccggctaatttttgtatatttagtagagacggggttttgccttgttgcctaggctggtctcgaactcctgacctcaagtgatccacccgcctcagcctcccaaagtgctgggattacaggcgtgagccaccatgcctggctggcattatattctttttaggggaggttactttggaatttgtctttatcatcatggatgttctcaatattcctagtatactagctagaattgaccctcgtgtatatggcagtatcatagaggttttagagctggtagagatctggcaatctaacttaactctttcttgctagcaaaggctgttggtcacctgactggcctaacggtaggaggtagaaggcagaaggaaagtaactgaattgagaagctgtttctgtttaataaggtgttgctgaagctagttaaaccctctacctgtctttaaaccctctacctgtctttgggttaatttacatgtttgtcatccccttacytggatatttatagctgtacccaggaaccttgtctatactgagaatatatagtgatgagggtttttctttttcccaggtattcctgattgtcatcaagcttatagtagatgaaccactaaaataatactacaatttgacattagtgttcttgtactttatactattgaaactgaaaaatactgtattaaaccaagtaatctgacagtctatgaatgttctaaatgaataccacctccaagaaacatggaaacaatggtaactgtttttcctagtaaactcattcacacctataaaatgaatggaaattaaattgttatggtcacacaacgtcataatgcgttacaggcaaagctgttgaccacttagaggtagtattcattgagaaacattcttagactgtcagattgcttgatttagtgtaaagtaatttttttttttttgagacaagggtgtttcactcttgtttcccgtgctggagtgcagtggcgcaatcttggctcactgcaacctcagcctcccgggttcaagtgattctcctgcctcagcctcctgagtagctgggattacagacgtgggccaccacgcctggctaatattgtatatgtagtagagacggggtttctccatgttggtcaggctagtctcgaactcctgacctcaggtgacctgcccgccttggcctcccaaagtgctgggattacaggcgtgagccaccatgcctggccagtggacagtattttctagtggggagaattaaagaaaaactttgtccgggtgtaaaccagctttaaatcttggttctcttacagtgccatggtagggatagtcagtggaggctttcaaattcagaaagattgataatacyttaacatggttcctatttctaattaataataaaatgtatttgtgcttttttaatcaaaggtttctacgataaagacagttcagggtggagttctagcaaagataaggatgcgtatagcagttttggatctcgtagtgattcaagagggaagtctagcttcttcagtgatcgtggaagtggatcaaggggaaggtaagtgatttcttaatcaccttacgtgtatgtataataacagtttaataagtcgttatcctgaccacctgtttggatgttaagcattatgtctgtttggtcattgtattttcttagccgtaagaggcttttactaaattgaacctgttacttagaaattagatgaaaataggaatatgctcattggcataatgaaatgagttattctatttctcgagttttatatgttctacttaaaagagtaagttcatctagtgaatggcctaatttggttgggatttttgtggastctataacaatttctaaacaccttgtatttttgattacacaagtgtggtgaactgaccccacgtgcctaatagctgtggttagtcctgtgtcctgatttttcgcaaacaggcctaaaactcttaaaaacatcttagttcaggtaaggattattttctaccttttatccaaagtctgtcacacaggtgaattgtcctttaagtgacatcctagtataactaggacgattgatatttggtgtgctattttcttgttttccctaccattaaatatatttggatgagcactttaaatgaaggttgtgagctgtgtgccgatttcaaataaaatccttattcttaattttggcatctgtgaggccttttaggctatacaactttatagaaatgtaaagattactgattttagaaaacgaggttatgtaaatgatgctggttagagagccttatttgtcaagtaactcagaattggattgttgacatccttatggttagccataacttaagtctccagatacagttctagagtagggataagaatctgataatggttaaatgatatgattctgattaattgcttgtgctgttcaggtttgatgatcgtggacggagtgattacgatggcattggcagccgtggtgacagaagtggctttggcaaatttgaacgtggtggaaacagtcgctggtgtgacaaatcagatgaagatgattggtcaaaaccactcccaccaagtgaacgcttggaacagtaagtttttgaagtgtatgttacttgtgatgaagccttactagctagtataacaaatgaacttatccattttttgatttgagggaactcttttctggaggcaacactgggattaattttgagaaatacgatgacattccagttgaggcaacaggcaacaactgtcctccacatattgaaagtgtgagtatttttgcttgactttttaagacacagagaggttaaatgttttcatgttacattagaatgtgagatgggcttcataaagtcatgtagaccagaggcttcatagatttgtggaaaaggagaagttgagttcagtgtcaccattatgaataatttattacctaaaatagaaaatgggtcaaacataggaacaacccaaagtcttctccaatgtgcagtaagcctgggggttggtttttctcaaagtataatgtgataattttacttaaactataaactgagttaccaatcagctgttggttggtkgtttccattattagtataaaacagaaatagctctagatagcattcctaaccccattgaatttcttaacagttcagtgatgttgagatgggagaaattatcatgggaaacattgagcttactcgttatactcgcccaactccagtgcaaaagcatgctattcctattatcaaagagaaaagagacttgatggcttgtgcccaaacaggtaagctcaactcataagagtaaaacatcatatttcttctgtaaaggactagacaataaaatattttattttttatgggtcatgcagttttgcagctgctctgcgctsstattggactgtgaaagaagccatagatgatacataaattattggttacggctgtattccgtaagagctttatttataaaaataacaggctttatttacaaaatagtctcagtttgctgactcctcttagaggtggagcagagaagccactttttggaaaacttaagcataaactaaaagtactaattattagtaatagggtagttaaaaaacactgtcatctaccaatgtctgtttaaaagtaatgagcaggatttgtttgtttgtttttgaacagggtctggaaaaactgcagcatttctgttgcccatcttgagtcagatttattcagatggtccaggcgaggctttgagggccatgaaggtagatgtttctttataaaatgggaaattgtagaactttgtagrtggccattgagagggctttctaaatgatgctaagacttaagtagaatgaaaaccagttttcaagtgtaatctgtaatctrtaaattacaaaagggaattatgttgtgatgaacttttcaaacagggtaggtagagttaacttaaaaattaacttatttcttaggaaaatggaaggtatgggcgccgcaaacaatacccaatctccttggtattagcaccaacgagagagttggcagtacagatctacgaggaagccagaaaagtaagtatgagttccagtgattattagctttttcattgattctaattaaatgttttatgaacatgtaaaaattttgaccttgaagttcataacattttttttgcttatagttttcataccgatctagagttcgtccttgcgtggtttatggtggtgccgatattggtcagcagattcgagacttggaacgtggatgccatttgttagtagccactccaggacgtctagtggatatgatggaaagaggaaagattggattagacttttgcaagtatgttttattttgtttttgttkttttgttttgttttgttttgttcttttgtttttggcagagttgcgctcttgttgcccaggctggagtgccatggcgcgatctcggctcaccacaacctctgcctcccgggttcaagcgattctcctgcctcagcctcccaggtagctgggattacaggcatgtgccaccacgctgggctaatttttgtatttttagtagagrcggggtttctccatgttggtcaggctggtctcgaactccygacctcaggtgatccgcctgccttggcctcccaaagtgctgggattacaggtgtgagccatcgcacccggccaagtatgttaatttttaaatgtatgggatgcagtattaaagttactgcccattagttttgtggtgrtgttaacattgtctaaatgttaaggctgagaagtgatgtatttcagacatctaactttcacaaaaagcttgttcatggtaattttaatgttgaaaaatcagtaacatcttggttgagacttacaacaatgatcagctcgtgggacagtcaactaggatgggctaatttgactgtgtaatcttgaatgacttatgtagtggcaagaatcctgtgctgtgtctgtaaaattatgcagtgtgaggcaccatcttaatgaatatataattgtaataacctatacaattgtatttgtaattatactaacagccatactaaaaccatgttgatttctcctcaaattctaaactcaggcttgttttttttcatgacatgacagatacttggtgttagatgaagctgatcggatgttggatatggggtttgagcctcagattcgtagaatagtcgaacaagatactatgcctccaaagggtgtccgccacactatgatgtttagtgctacttttcctaaggaaatacaggtactgtttgatgttgcaaattttatttatttagaaatttgtttatctcaggtaataataaaaattttttttctttcagatgctggctcgtgatttcttagatgaatatatcttcttggctgtaggaagagttggctctacctctgaaaacatcacacagaaagtagtttgggtggaagaatcagacaaacggtcatttctgcttgacctcctaaatgcaacaggtaacattatgaattttttattttattagacatgggggtttctctttgttgcccaggctggagtgcaggggttattcacaggtgtgatctcattactgatcagcatgggagtatttgacctgctctgtttctgacctgggcctgttcaccyctccttaggcaacctggtgctcccttgcttccgggaggttaccatgttgaygccaaacttagtgtggacacctgataggcatagtacactacagcccagaactcctagacttagacaatcctcctgcctcagtctccagagtagctgggactacaggcactcaccactgcacccagctaaaattatgaataatttaattgctctggtaataacccatttgggctgggtgcagtggtacagtgcatgtagtcccagctacttggcaggctgaggctgtagtatgccatgattgcacctgcgaatggccagtgcactctcagcctgggcaatttagtgagacccccatctcttaaatgtatttggattacctttattacttttcctcctcaattcaaaacatgctgtgttgaaagcccgtttttaagaagatatatatgtattttaattgacacattaaaattgtgcatacataagtgcaaagagaactaagccatgttagtgacaaaaacctataatttttcaacgacaggcaaggattcactgaccttagtgtttgtggagaccaaaaagggtgcagattctctggaggatttcttataccatgaaggatacgcatgtaccagcatccatggagaccgttctcagagggatagagaagaggcccttcaccagttccgctcaggaaaaagcccaattttagtggctacagcagtatgtataaacatctttcttttattcaaattgagcatgttcaagyatttgttttcttttaagtgggccatatctcataaaagttattttccaggtagcagcaagaggactggacatttcaaatgtgaaacatgttatcaattttgacttgccaagtgatattgaagaatatgtacatcgtattggtcgtacgggacgtgtaggaaaccttggtaagtatttgattacttgatggtttcattgttttttgctgtgatgtgtgcaggaaagaacttgctaggatctaaaatacatttttaacaatgaaagtgacaaagattttgctcaaagcacttgtttaaatattacgtggtaatattttaaatatttctacgtaggaaagtaagaatagtagcaagttactttatggaagacctttgtttatatacttttttgggaactcttttaggcctggcaacctcattctttaacgagaggaacataaatattactaaggatttgttggatcttcttgttgaagctaaacaagaagtgccgtcttggttagaaaacatggcttatgaacaccactacaagggtagcagtcgtggacgttctaagaggtgaggtataaatagtatataatgaggggaatgggtgttcacttacagttcatagtgtttcctctgcatgcataacgtccaaggttaactgtacagtatttaaaaagcttaatcatcttaggcttcctagattctttggtaaggggttgtattagaatgggtgacactctgttggggaaaatatggctggatggggaattgtttgaatggaaaaattagaaattggtcattaggaaagagttaggttactttagtggaatttcatcttcatgtgaaccaacataatttttttcttatagtagcagatttagtggagggtttggtgccagagactaccgacaaagtagcggtgccagcagttccagcttcagcagcagccgcgcaagcagcagccgcagtggcggaggtggccacggtagcagcagaggatttggtggaggtagtgttaatctgtaacttcatagctttgggaagggtttttttccttttagtcatctttttcaaagcctaattaaacaatttaagttcagcactatagaaacttgatggcaaattacgtaagggaaggattgtatttaatgatggataacttcattaatttctctctctttttaaatctctcattaggtggctatggaggcttttacaacagtgatggatatggaggaaattataactcccagggggttgactggtggggtaactgagcctgctttgcagtaggtcaccctgccaaacaagctaatatggaaaccacatgtaacttagccagactataccttgtgtagcttcaagaactcgcagtacattaccagctgtgattctccactgaaattttttttttaagggagctcaaggtcacaagaagaaatgaaaggaacaatcagcagccctgttcagaaggtggtttgaagacttcattgctgtagtttggattaactcccctcccgcctacccccatcccaaactgcatttataattttgtgactgaggatcatttgtttgttaatgtactgtgcctttaactttagacaactttttattttgatgtcctgttggctcagtaatgctcaagatatcaattgttttgacaaaataaatttactgaacttgggctaaaatcaaaccttggcacacaggtgtgatacaacttaacaggaatcatcgattcrtccataaataatataaggaaaaacttatgcggtagcctgcattagggctttttgatacttgcagattgggggaaaacaacaaatgtcttgaagcatattaatggaattagtttctaatgtggcaaactgtattaagttaaagttctgatttgctcactctatcctggataggtatttagaacctgatagtctttaagccattccagtcatgatgaggtgatgtatgaatacatgcatacattcaaagyactgttttcaaagttaatgcaagtaaatacagcaattcctctttcaacgtttaggcagatcattaattatgagctagccaaatgtgggcatactattacagggaaagtttaaaggtctgataacttgaaataggtttttaggagaattcatctacttagactttttaaatgcctgccataaatgaaattgaaatggtagaatggctgaccacagcaatgaccagccctcattagggccctggatgatttttggtctaataacgcatgctagtgttgatgttttttggtcaagagggtatgaacaggaagaattaaatgcagcaggctttattttaaatgccgattcacattactctgttcaagctgcgttgagatgttaaactggcttactatagacttcgtaaaaatggctccagaagagtaacaaactgaaatctttgagatcacacaggttggaaatatgtacataactgcacaaggtgtcaattctgctctacagtgcagttttagtcagttttagttgcataggtttccattgtatttatagtctgtttatgctaaatctggccaaagatgagcattgtccaccactaaaatgcctctgccactttgaattctgtgctaattttgtggccagaatgcggtgatcaaaacgctccatctttttacagtggcataggaagacggcaaaaatttcctaaagtgcaatagattttcaagtgtattgtgccttgttctaaaacttttattaagtaggtgcacttgacagtattgaggtcatttgttatggtgctatttcaattagtctaggtttaggcccttgtacattttgcccataactttttacaaagtacttcttttattgcacattcagagaattttatatatatgtcttgtgtgcgtgtccttaaacttccaatcttactttgtctcttggagattgttgaacgcagcttgtctaggaaggggatgggactagattctaaaatttatttgggaccatgggaatgatagttgggaagaaaactatttgcacacgacagatttctagatactttttgctgctagttttatgtaatatttattgaacattttgacaaatatttatttttgtaagcctaaaagtgattctttgaaagtttaaagaaacttgaccaaaagacagtacaaaaacactggcacttgaatgttgaatgtcaccgtatgcgtgaaattatatatttcggggtagtgtgagcttttaatgtttaagtcatattaaactcttaagtcaaattaagcagacccggcgttggcagtgtagccataactttctgatgttagtaaaaacaaaattggcgacttgaaattaaatcatgccaaggttttgatacacttgtcttaagatattaatgaaacacttcaaaacactgatgtgaagtgtccagattctcagatgtttgttgtgtggattttgtttagttgtgtgtttttttttttttttcagtgaatgtctggcacattgcaatcctcaaacatgtggttatctttgttgtattggcataatcagtgacttgtacattcagcaatagcatttgagcaagttttatcagcaagcawtattttcagttaataaggtttcaaaaatcatgtaaggatttaaacttgctgaatgtaaagattgaacctcaagtcmctgtagctttagtaattgcttattgtattagtttagatgctagcmctgcatgtgctgtgcatattytgattttattaaaataaaaagttgaactgcacagtctcctttgttgttgtcaattgtggtttattttcagaggtgtaaataaagtgctcttgcctgaaaaattgtaaaatgttattttttgcttgtcatccagtgctattttttgagatgcctcttggatacagaatgactcataccataagtatttgcaatgaaagatgaagatagtattagtttgaaatacagtgaaacaggatttttgtaatagacggaaatctaaaaggcccttactgataatacagcatgtattagaaattggcttatactttgaacaatttgacatgggtgggagtctctttgttctttgaagtatctattatgaaggatggttgaacagtggaagaatgagcaggataaaagtcaagtgtgtcagtagtccaacaagtgatggtaagtatatacttagggaaggaatcaagactatttgggccaggtgtgatgattacatagtcctatagtgctagtttacttggaagctgaggggcaggaagattgcttgagcccacgagttcaagtccagcctgggcaacgtatagcaagaccttatctctgaaaacaggtaataagacatctatgcttactgtacacactgctgcaataggctgctaccacaagtgtataggtgcttggttagattgagccatactagcggtttgatacgtttcaatctaacaaatacgtattcagcttttgtttcagtaagttgaaggtttgcagtatgattaagaattttttgcattgtaaggaagtatggttctggataatctttccagtcatgaactcaaaataagcataagtttttagggcagaattttgacacatggccatatgtattttgaagatagaaaagatgatggtacttgagtctcgatttagtcaaaataagcatggaaaggtttgggattgctagattggatagtcaatggctgaaagtgactcatggagtgaaacgatgctaaggagagttcagtttccactttatgtgaatgatgagtgaacatgacaatctgctctggaggaactgccaaaatttgaggttatttctagtctagcatggttaggattatggtgacataaatttagtatgtttacatactacattaatgtggtttaattttaattacacttaaatgcagttgtcactcttgggcactgttgatgtgtttcctggattcttggctgaatttcaagatttttaaaatggctttataggagctgtgtctaaccttcatgcttaaartgtttcctttgctcctatgctctacgtgacctgcttgagtggccacaggcttgctctttagagcacagtgactttgttgatagggcctcactactcccacaatgcagagatacctacttattgtaggtacagggcattgaaagttataagactatctttgggttttgctttcttgtgttccattctatttttaatacaattctgagtatatttaaacctgctttgcttcatgtcctyatttcagtttatgatctatttttcagcatgtttagtgtcattgtttctaatgtggctgtcctctataatgactactcttcaatttcttcattttttttttcctcttagttttctctacatacacttgactgggtttttaggataattctgagaaaggacttttttttgacaaagcactgtttaattatattatgaaaggatattttgtgacttggaaagatgtttattatgggagaaaacaaaacggaccaatacgatttaagagcaggaaataggtgtctcaaaacaagataaagtcagcaattccactcctaggaggattctacccaggagaaatgaaaatgctaagtatgtgaatgttttgtagcattattcatcgtaaccaaaaagtggaaacaaaaatgtccctcaactgacaaatggataaactaaatatatacataaaatgagatactatctcctctaggtgaacagccacatccccaatttcctcccccctcttcaaagggtcattaggtaggcctatcagtactgtgacatatctatattctaaggctttctgtagatgtatatccagttttagtccttattttactgtgtgaagcagatacaatcatggtttattggatatttactgtcttccttgttacattgaagatgtttcatttttcgagagaagtacctcctatctttcgctggagatcctccattcacttccttttccactcattctattcccaacagcccatctcatttacctaacagtcaacattagtggtatgcagaatggtccctgaacctcttctccagacctcaatcacctgatgggatctttcagtgcaaggcgagggttgacttagggtgcaatcaaaacctgatttggtgtctgcttgagtattggcactgggagatgtagtgattaatttagattagtctttcctttcttggaacctagccattttccttttgtgtttctccaacttggtgttgcaacagaaagtacctgggaaatgattctagggcaactctcctaacaggatcctccacctctgaggttctctcagaaatctgtggttttggttttggtttttgcytgtgtttttattcctaaagctccccaggcaattctgatacagcaggcttaggtgtggagtccactgttcactccccttctttttgtcatttgtttcagacttagcattgccatgatcatgcttctggttcttcattgtggaagcatctctgtattccaaattaaaacagataytgcaaacaaagtaatggcattctattacgtggcccctatggcgtggttctaatctaccattgcagctttaacttgcctcccagaccttatcctgtagctgaatgtcatgctactgtctatgcaaatcctgtgctttcttctgcctttgccttagtttttgctcaccatgttccttctaactagaattggagctaaactaatgttttaaaatattgggctgggcgcagtggctcacgcctgtaatcccagcactttgggaggccgaggcaggcagatcacgaggtcaggagatcgagaccatcctggctaacacggtgaaaccctgtctctactaaaaatacaaaaaaaaaaaaaaaaaaaaattagccgggcaaggtggcaggcacctgtagtcccagctacttaggaggctgaggcaggagaatggtgtcagcccaggaggcagagcttgcagtgagctgagattgtgccactgcactccagcctgggtgatagagcaagactccatctcaaaaaatatatatatattgtattcagaatattaaggtgctggcccggcacagtggctcacacctgtgatcccagcactttgggaggtgggtggagttcaagaccagcctggccaacatggtgaaactccgtctctactaaaaaaaaaaaaaaaattagctgggcgtggtggcaagcgcttatagtctcagctacttgggaagctgaggcaggagaatcacttgaacctgggaggtggaggttgtagtgagccaagtttgtgccactgtactccactgtgggcaacagagtgaggttccatctcaaaaaaaaaaaatctctctctctatacacacgcatacacacacacacacacacacacaataaagctgccattgacaattactagtgacatagagaaaataacttgttccagtgggtagagaaaaaagtaggttacatctcagtgtgcagaatgatcttaagtattttgaaaatacatagaagaccagaaggaaacctgctaaaatattaatagtttttgctactggttgaaattataaagattttctgctgctttatcctttcctgagcagattttatacggttaaaatgtattttctaataaaactgtatagattcacaggaagttgcaaaaacaagagaggttccactgtatccttcacgcagtttcccccaatggtaacatctggcatactgcagtacaaaaccaggaaattgccattggtacaatccacacaccctgttccaatttcaccagttttactcatttgtatgcagtcatgtgtgtagttctgtgcagttttatatgtgtagatttgtgtaaccccctccacagaacagttccatcatcacaatgatctcccttgtgctacctctttttttttttttttttttgagacagggttgcgcaggctggtgtgaccatagctcgcagtagccttgacctcccaggctcaagcaatcctcccacctcagcctcctgagtagctgggactacaggcgtgtgccaccacacctagctaatttttaaattatttgtagagatgggatcccactatgttgcccaggctggtcttgaactgaactcctcaagtgatcctcctgcctcagcctcccaaaatgctgggattacatgcatgagccacagtgctcagcttgctacctctttttaaatcgtatctgtccccttcctgcttccctaacctgtccccaacccctgacaactacttgtctgtttaacatctctaaaatgtaattttaaaattgttacataaatgcagtatgtgaccttttgagactaggttattttgactcagtataatgtctctgatcaatccaagttgttgtaaatagttttgttgttgttgttgttgttgttgttttgagatggagtctcactctgttgcccaggctggagtgcagtggtgcgatctcggctcactgcaacctctacctccagggttcaagcaattctccccaagtagctgggattacaggtgcatgacaccacacccagctaatttttgtatttttagtagaggcggggtttcaccatgttggccaggctggtctcgaagtcctgacctcgggtgatccgcccgcctcggcctcctaaggtgctgggattataggtgtgagccaccgtgcccggccagtttgttcttttttattgctgaatagtatagatattctgtagtttatccgttcagccgttgaaggatatttgtcttgtttccggtttgtgacttacaaataaagctgccatgaacattcagctacatatgaacctatatacaggttttcgtgtagacataagttttcatttatgtggcataaatgcccaggagtacaattgctggctcctgtgttaagtatgtgttagtttaaaacactgccataccatttttcagagtggctgtaccattttacattcctaccagcaatgcaggacagatccaatttctctgcatcctcaccagcatttggtattgttattattcttactattattattttttgagacagggtcccactctgtcacccaggctggagtgcagtggccctatcatggctcactgcagccttgagctcccaagctcaagccatcctcccacctcagcctcctgagtaattgggaccacgggtgtgtaccaccatgctcrgctaattttctttttctttttttttttttttttgagatgtggtctcactatgttgcccaggccagtcttgaatttctgggctcaagtgatcctcccatctagcccagcactctcaaagtgctaggattacaggcatgagccaccacaccaggcatgtcattatttttaaattttggctgctctaattggtgtaaagtagtatcttattgtcttaatttgcatttctctaatggctggtgatgttgaacatcttttcrtgttcttatttgccatccctgtatcctctttggtaaaatatatgtctgtgtcttttgctcatttttaaattgatagttttttactgttgagttttgagagttctttattctaagtacaagtctttttgacagcttgcaaatattttctctcaatcaaagtcgtcttttcatcttaaaaaggtcttttgcagagcaaatgcttttaattgttcttaaacatttaaaagtttgatgtagtccaatttgtcagcttttttttttttttttttttgagacagtgtctcactctgttgcccaggctgaagtgcagtggtgtgatcttggctcactgcaacctccgcctcccaggttcaagccattctcgtgcctcagcctcccaagtatctgggattacaggtgcccaccaacatgcctggctaatggctaatttttgtatttttagtagagacggggtttcaccatattgaccaagttagtctcaaactcctgacttcaggtgatccacctgccttggcctcccaaagtgctggggttacaggcatgagccacctcgcctggccagtatttctttttttttttttttttttttttgagacggagtctcactctgttgccaggctggagtgcagtggtacgatctcggctcactgcaacctctgcctcctgggttgaagtgattcccctgcctcagcctcctgagtagctgggactacaggcgcacaccaccacacctggctaatttttattttattttattttaatagagatggggtttcaccgtgttggtcagggtggtcttgatctcccaccttgtgatctgcccgcctcggcctctcaaagtgttgggattacgggcgtgagccaccgtgcccggccggcatcattcgtcaaaaagaatgttctttctccattgaattgcttttgtacctttgtcaaaaatcagttggctgtccttttgtgaatctatttctaggttcacaattccgtttcattaatctatatgcctatccttccaccattcctgcagaatatcacactaattcttttttttttttttttttttttgagacggagtcttgctctgtcacccaggctggagtgtagtggcatgatctcagctcactgcaacctgtacctcctgggttcaagcgattctcctgcctcagcctcccaagtagcttggattacaggtgtgcgccaccacacccagataatttttgtatttttagtagagacaggttttcaccatgttggccaggctggtcttgaacccctgacctcaggtgatctatccacctcggcttcccaaattgctgggattacaagcgtgagccactgcgtgtggcctcaattatttttatctatataataagtcttaacgttgggtaggagtgattcctctcactttattatagttttgcaaaagtaatttagctcttctagttcctttgcctttccacataaattttagaataagctttttttctatctacaaaagaatcttgctgggattctgatggtaatgctgctaaacctatagatcagttttgaggagaatcgacatctttactatgttgggtccaaaacttttttatttttatttttttgagacagggtccagtcttgctctgtcactgggctcaagcaatcctcctgcattagcctcctgaatagctgggactacaggcacacaccaccacacctggstaatttttgtatttttatttttagtagagacaaggtcttgctatgttgcccaggctagtctccaatgcctgagctcaggcgatcctaccacctcagcctcccaaagtgctgggattacaggcgtgagccrctgcgtgcagcctaaatttatttttatgttgtgaacttggaatatccaaccaacagtaaagattacctagtacttcctaacatgggattctcctatttgttcatcctaggatcatgctcctctgtggagcaagtgcctccatgaaatgccatattttgtgaagaaagtgcatgcaggaatattcaggagtccagcatgtagtcatggcagccttaggtatttgagaccgaccaaccctcctgatgaagacaaccataactcatgcaggcatgagtctgtaagcattcttagtctgtaagcaccttttggaaggtttcctatctgggacagagatagacactctttttttttttttttttttttttttttttgagatggagtttcgctattgttgcccaggctggagtgcaatggtgtgacctctgctcaccgcaacctccacctcctgggttcaagcaattctyctgcctcagcctcctgagtagctgggattacaggcatgcgccactatgccctgctaattttgtattttttagtagagacagagtttctccatgttggtcaggctggtctcgaacccccgacctcgtggtctgcccgcctcggcctcccaaagtgctgggattacaggtgtgagccaccgtgccyggtcgacgctttctaatagtcaattaagtaagttaataactgcctgggcagaaaatgcagtattcagctaatcccaaacttggaattttctaccttttcagtttcatcttcttaaaactcatcattttgagagtactttggagttacttgaatattaattctcagcatgcattcaacttaattaccttaatgtcccaggattttaataacccttaaaatttccatgtcaattttcatcagggaaccttgtccttgaatgctgctgctgtgacttcctgtagaagttctttaattggaacactcttggcagagccttccctttcatatggagcacaaaagcagctgccatgctcaatttgcagtcctctttattgtgcggggattttttttattttttattttttgagatggagtttcactcttgtcccctaggctggagtacaatggcgccatcttggctcactgcaacctccgcctcccgggttcaggcaattctcctgcctcagcctcccgagtagctgggattacaggtgcccaccaccactcctggctaatttttgtatttttagtagagacagggtttcaccatgttggccaggatggtctcgaactgacctcaagtaagacacccaccttggccttccaaagtgctaggatcacaggcgtgagccactgtgcctggcctgtacaggaattttgaagaaatctacagtgttaacagaacccgtggtataaatttatcccaagtatcagtgtcacaaatactctttgcgtctaagaaacatgctttcttggaagcaacactgggaaaactaagtgatttcacttttgcccaccacaggaatgaagtcttactgcatttattagcaatacccatggttgaatctcttttacttattttctatttcccaaccttttcattttcttgcatggacatctgaaagttgcctccaggccgggcatcgtggctcatgcctgtaatcccagcactttgggaggtgggcatatcacctgaggtcaggagcttgagaccagcctggccaacatggtagaagcctctactaaaaatacaaaaattagccaggcctggtggtgtgcacctgtaattccagctacttgggaggctgaggcaggagaattgcttgaacccaggaggcagaggttgcagtgagccaagatggtgccactgcacttcagcctgggcaacagagtaagattccatctcaaaaaaaaaaaaaaaaaaaagttgcctccaaattttggagtgagataaggtataagtatatcaaatgaaacgttaaagctatttttwaaaaagtgggccaggtgtggtggctcatgcctgtaatcccagcactttgggaggccgaggcaggtggatcacgaggtcaggagatagagaccatggtgaaaccctgtctctactaaaaatacaaaaaaaaataaaaaataaaaataaaaattagccgggcgcggtggcgggtgcctgtagtcccagctactcgggaggctgaggcaggagaatggcgtgaacccgggaggtggagcttgcagtgagccgagatcgcgccactgcactccagcctgggcgacagagcgagactcygtctcaaaaaataataataataataaataaatacataaataaataaaaccccaagagaggaagtagtgtcactccagccatatgtgtgccttttcttcccttagaagctttcaatttccggctgggcatggtggctcatgcctgtaatcccaacactttgggaagcggaggtgggcggatcacctgaggtcaggagttcaagaccagcctggccaacatggtgaaaccccgtctctactgaaagtacaaaaattagctgggcgtggtggtgcgtgcctgtaatcccagctactcgggaggctgaggcaggagaatcgcttgaacccgggaggcagaagttgcggtgagctgagaccatgccattgtattccagcctgggcggcagagtaaaactctgtctcaaaaaaaaaaaaaagaagctttctgtttcctcctagtggaggaggtatggagtgctcttgtttgtttgtttgtttgtttatttgagacagggtcttaccctgtcgcccaggctggagtgcagtggcgtaatctcggctcaccgcaacctttgtctcccaggttcaagtgattctcctgctgcagcctcccaagtagctgggattataggcatgcgccaccacacttagctaatttttgtgtttttaatagagacggggttttaccatgttggccaggctggtcttgcactcctggcctcaagtgatccacccgccttggcctcccaaagtgctaggattacaggcatgagcaaccacacccagcctagtgcctctgtttaaggccaaatcttctatttgtttctcaggaacctagcgcttgtggttgtctctcatctattcatgcatcatctatatttcccactctcctggctcactcccttaatatcacccatctttgtttggggggggcacagttggggtatagggtctcactctgtcacccaggctggagtgcagtagcaccatcacggctcactgtagccttgacctcttgggctcaagcaatcctcccacctcagcctcccaaactgttggaattacaggcatgagccacggtgcttggcccaatatcacccatcaagccctcttgatcttatgtccctctgcagcttgccgctctgttttttttttttgtactgccccctgcttcctgcaagacctcaaatccactgtgtctacttcttgccttatttttattctactctaatcagcttttgtcatcccaacgaagtggctcctataagtcacagtcggccgggcatggtggctcatgcctgtaatcccagcactttgagaggccaaggcgggtgggtcatgaggtcaggagatcaagaacatcctggccaacatggtgaaaccctgtctgtactgaaaatacaaaaaattagccgggtgtggtggctggcacctgtaatcccagctactcaggaggctgaggcaggagaatcacttgaacccgggaggcggaggttgcggtgagttgagatcatgccactgcactccagcctggcaacagagtgagattctgtctcaaaaaaataaaaataaaaaaaagtcacagtcacctattctttgtcgttttactaggcccttcagcagtactgtacactgagtacatcctcatggacatgctttagtccctaggtttccatgtgcgcacacttcttggttctcctccactttggcctctcatgcctggccctctttctcctcacaacccaaatattagacaatatatcacaaacaaatcccgaagtgctgggattacaggcatgagccactgtgcccggcctacttaagtattttcatagattatctaatgttcaaataatgcaatattcctcagcatctgaacaaatgcatggaatggatggtggatagcaagagatacttgtactttctctctgcctttccctgccttctccagggtccccccacatctcattaagtggcatcttctttcacctagtcactcaggtcaaagctgggaagtcattccttttttctttctctcataccacttgtcattgaatttcctaagttctatctccacacctgcccactgcatcatcaccactgctaaaatcctgagccaaataattaacttttttttttttttttttttttgagacagagttttgctcttgttgcccagactggagtgcaatggtgcgatctcggctcactgcaacctctgcctcctgggttcaagcaattctcctgcctcagcctcctgagtagctgggattacaggcgtgtgccaccacgcccggctaatttttgcattgttagtagagacggggttttgccatgttggccaggctggtctcgaactcctgacctcaggtaatctgcccgccttggcccctcaaagtgctgggattacagatgtgagccacaatgcccagctgagccaagttaacttctttcctcatctgaactactggaacagcctccttacctggtctccctgtctccatcatgacttactatacaagactcctgccaaccttccctcatccactgtgctcctatcataccagccgcctttcaatccttaactgcgccaagttcatcctttctgctggaacctcctttcttcacatggctgtctcctcctcattcaggactcaactcaagtgtcacttctcctgagaggctctccctgacatccttaactaactactctaattataaagttccaaggaagcgctacagaaaagacatccgtcccctgacagggctctgggctagtctcttccctatgggaggtggggcaggagctgctgaggctcatgattcttctttggccacctcactcccagctgatgagggacaggtcaaggacagcctgtgcttccactggctcctggtcactacatgtagcgcactccaggtagacacgttcttcctggctcccatattatgagctcatcagacagcctcccctgctgtcttcctgccttgaaaggatctaacatgaaagcactyttactttctaaaagtaaaatgctctctattcatgggcaagagattaccacctcactgactgggaccttcagctaatgcctttctttctgggcatttctttctttgctatgaagtgagaagaaccatacttgctgtatacaattaagaagtgatctattcaaagagccacttgatgactgagtgcaatggctcacacctgtaatcccagcactttgggaggccgaggcagtggattacttgaggtcaggagttcaagaccagcctggccagcatggtgaaaccttgtctctactaaaaatacaaaaattagctgggcatggtggcaggcgcctgtagtcccagctacatgggaggccaaggcaggagaatcgcttgaacccaggaggtggaggttgcagtgagctgagattgcaccactgcactccagtgtgggcaatagagtgagactctgtctcacaaaaaataaaagagttgatgattccatggttcctatggacatataatagttgactgtcacaaaaaatataactctggccgggcgcagtggctcacayctgtaatcccagcactttgggaggccaaggagggcagatcacctgaggtcgggagttcaagaccagcctgatcaacatggagaaaccccgtctctactaaaaattcaaaattagccaggcatggtggcgcatgcctgtaatcccagctactcggaaggctgaggcaggagaatcacttgaacccgggaggcaaaggttgcagtgagccgagatcgcaccattgcactccagcctgggcaacaagagcgaaactccgtctcaaaacaaaagaaacaaacaaacaaacaaaaaaccaaaaccctgccgcaatccttccactactctcccatgggaggaagctcagagccaccctgaccgctcttcatttcaccacctctctccatttgtcagtgacctgaggctgcctcattgtttctgagcactgttcatatcagctgttcttccacgcttccttcagcctagaccccagaaacagctgcccctctgccttcattctctcacccttctgtaacagatatccccttccactccttccttcctaacagaaccccaatttggttcaggatggcaatgtgcctctctaagaatagttggctcctcagccttgtactccaggagagacttgcctcccagttccggtcaatgtagtaatgggagtaggtgggagtattaggtggaagtccatggggcgggtgccccttcccaagcaaagcctcacaagaggcttttggctctgctcttttttctctcctagaacttggagcgtgatgcccagaagtgtgtgaactggtctgtgaccacaaagatgagaaccgcatgctgagattggtggaatggagacttcagtgagcctacatgcagatgacatggtgacacccgtgcccagcctgagctgttttcttctggccctcttattacatgagaaaaataaacacctatgcaccttggcctcatcccctcggctgtctattcttgcaactttggggcaggtttaaatttttttccaaattaaaaattggggccaggtgcagtggctcatgcctgtaatcccagcactttgggaggctgaggcaggcggatcgcttgagcccaggagttaccaatgaaatggagtgatgtctgggatttgcttccaaatagagaggaagtgggtcagggtatagatgaaacaggattgatcacagttgacagttgttggagttgggtaattggtaagtctttaaaaaaatattctctttagataaattcccaagaatgctgtgcgaacacttatgagcttgatattgtgttatgaattgattctttttttttttttttttttttggagagacagagtcttgctctgttgcccaggctggagtgcagtggctcaatcttggctcactacaacctccgcctctggggttcaagcgattctcctgcctcagcttcccaagtagctgtgactacaggtgtgtgccaccatgcccagctaatttttgtattttttagtagagatggggtttcactacatgttggtcaggctggtcttgaactcctgacctcaggtgatccacctgctttggcctcccaaagtgctgggattacaggtgtaagccaccgtgaccagcctttttttttttttttttttttttttgacacagagtcttgctctgtcacccaagctggagtgcactggcatgatcttggctcactgcaacctttacctcctgggttcaagcaatcttttcccctcagcctcccaagtagctgggactataagcccccaccaccatgcctggctaatttttgtattttttgtggaggcatgttctcactatgttgcccaggctggtctcaaacttctgggctcaagggatcctcccacctttgcctcccaaagtgttgggattacaggcctgagccacctggcccggcctggatcagttcttcacactgctaatggtgcataattgctatctgcttaaaccccatggtttgtggttcctgaaacacatttgtcttctcctaatgtaaatgatttgaaaaggaggtaaaaggtattctggttccagccccctgcatgggctaaaaggacacaaaaggaaaaggatgatgttagtaagaaaaggattacgcagctcaaaaaagctgagcccaggctcccttgacttcctgcatggcccctgtgccctcatcaacaccccaaaatgctaactccagttggctccactgtccaagctcccctccgatgcctgcttctcctaaactgcctgccgccaccctggttgaggcccccatcgatgccctcaccttaattgctgcagcagcctcagaattggtccagctgtcctgagggctctcacattccatccgttctccacccagaagtcagagccacctccccaaagagcaaatcagatatattattcttccgctaaaataaaccctgcagtgtcagttttttaaaaatgcaggaaaaaggcatatcacataatttaattttttttttttttgagacggagtctccctctgttgccaggctggagtgcagtggcatgatctcggctcactgcaacctctgcctccagggttcaagcaattctcctgcctcagtctcctgagtagctgggactacaggcgtgcgccaacacgcttggctaatttttgtatttttagtaaagacgggatttcaccatattgcccaggctggtcttgaactcctgagttcaggcaatccgcccacctcggcctctcaaagtactcggattacaggcgtgagccaccacgcccggcctaaaaaaatttttttggagggatcagagtctggttctgtcgcccaggctggagtgcagtggtgtgatctcagctcactgcagcctcgatcacctaggctcaagtgaccctcccacctcagctttccaagtagctgggactaccggtgtgcaccaccacatcctgctaatttttttatttttatttttagtattaatagaaactaggtcttgctgtgttgcccaggctagttttgaactcctgggctcaagtgatcctcccgcctcagcctcccaaagtgctgggattacaggcatcagccacagtgccaggccgatcatataacttataacacaaatagcagtctattaataactgtctcccaggccaagaaacagctttgccagcatcccagaggcccatcagagagactttcctggctggacgcggtggctaacacctgtaatcccaccacttggggaggctgaggcaggtggatcatttgaggtcaggagttcgagaccagcatgggcaacatggtgaaaccctatctctgctaaaaatacaaaaattagctgggtgttgtggtgcacgcctgtaatcccagctacttgggaggctgaggcaggagaaccacctgaacctgggagacagaggttgcagtgagctgagatcaggccactgcattccagcctgggctacagagagagactccatctcaaaaaaaaaaaaaaaaaaatactcttttctaatcttaaccccttcttcctaggggcagccacactccttccttgctttatagtttaatcacccacatacacagccctaaattttgctttgcctgtttttgagctttctttgttgtataatattccatttcatgaacaccacaatttatttgtttgtttgtttgtttgtttttgagacagagtcttgctctgtcacccaggctggagtacaatggcacaatctcagctcactgcaacctccgcctcctggattcaagcaattctcctgcctcagcctcccgggtagctgcgattacaggcgcctgccaccacgcccggctaatttttgtatttttagtagagacagggtttcatcctgttggccaggcagttctcaaactcctgacctcaggagatccgcccacctcggcctcccaaagtgctgggattacaggcgtgagccaccgtggccggccaaccacaatacatttaatccattttattattgctggacatttgagttgtttccaatattttgctattgagaacaattgcaaagcaagattggaggttacagaattttcaaacaaaagtagagaaggaatggtataatgaacccccatagcgctgtctgcagcttcaacaattaacactgcaatgcaattgtttgtaatgagggatgcgcatcagaatctctggaggtgcctttgccaaacacacagcaggctccagttcaatctctggagattctcagttgttggcttggcttgtgggttgggaatgtgtagtttgcaagcattccccatatgactttggggcacacctctgggtaggaatcactgtttcagtggctccttgttgcccttattctttaatgtgactgatatggcctggctcctgctttagctttcctacttttttgcttgccttttatttatttatttatttatttatttatttatttatttatttgagacagagtctagctctgtcacccaggctggagtgcagtggcacgatctcagctcactgcaacctccacctcctgggatcaagagattctcctgcctctaagcgattctcctgcctcagcctcccgagtagctgggactacaggtgtgcgccactacgcccagataatttttgtattttcagcagacatgaggtttcaccatgttgaccaggctggtcttgaactcctgacctcaggtgatccgcctgcctcagcctcccaaagtgctaggattaaagacgtgagccaccgcacctggccaatttatttatttatttattagaggcagagtcttgccatattgcccaggctggtctcaaactcctgggctcaagcaatgatctcaccttggcttttattcctaaagtcagattacaggtgtgagccaccgtgcccagcccctactttttttttaaactactccctcctttacactctcactctagccacactaagccacgtttattcttctgatgtttttctcgcttcctggcttttgcacatgcagtttctttctttcttttttttctttttttttttttttggaggcagagtctcgctctgtcacccaggctggagtgcagtggtggaatctcagctcactgcaacctccgcctcccaggttcaagtgattcttgtgcctcagcctcctgaatagctgggattacaggcatgagctaccacacccggctaatttttgtagttgtagtagagatggggtttcaccatgttggccaggctggtcttgaactcctgatctcaggtgatctgcccacctgggcctcccaaagtgctgggattacaggcatgagccaccatgcccggcctgcacatgcaatttctgtcaaagacatgctttcttttccctttcttctgcctattttctcctttaaatctctttatagtggctggatcagtcaggggcctgagagaaaacagaagcacacctggcaagatttttttttttacttgtattttttaaagtttacatagagtaaaactgaatttttgaggctgtacagttctgattttaacacatacacagactgtgtaatcaccaccacagtcaggacacagagcatctccatcatctctaaaatctccctcttgctgtttctatcacaccctcccctgacaaccaatgatctgttctccatcactgtggttttgccttttccagagtatcatataaatggaatcatatcgcacgtaaccttttggactggcttctttcactctgcgtgccttagagattcaaccatgtcgttgtgagcattagtacacctttccttttatcttggagtaaatacagtatttcattgaattgacataccacaattagtttaaccactgacatgtcaaaggacattttgatggcttctagtttttggtgattatgaataatgatgccataagcattcatgtacaagtttttctatgaaaatagtttttattggatcacatggtaagtagatatttaactttataagaaactgccaaactggtttgtatttatttatttactgagacagagttttgctctgtcacccaggctggggtgcagtggcacgatctcgggtcactgcaacctccacctctcagattcaagcgattctcctctctcagcctcccgagtagctgggattacaggagtctgccaccacgcccggctaatttttgtatttttagtagagacagggtttcaccatattggccaggctggtctcaaactcccgacctcaggtgatccgccccccttggcctcccaaagtgctgggattacaggcgtgagccactgtgcctggccccaaactgttttccagagtggctgtaccattttgaactcctaccagcagtgtatgagagttccaggggctcttccatcttaccagctggtgttgtcagggtgttttttattccagccattctaatatttaacttaatatctcattgtgattttgttttgcatttccctaacagccaacaatgttgagcatctattcatgtgcttatttgccatctatattattttggtggaatatccattcaaatcttttgcccatttaaaaaattggcttgttttcttattgttgagtattgagagttcttcatatattctggatataggtcccttgccagatatgtgatttgcaaatatttcctttctggagcttctctttccattctcctaacagtgtcttttttgttgttgttttttgagacagggtctcgctctgttggccaggctggagtgcagtggtgtaatcttagcttactgtagcctcaatctccctggctccagcgatcctcatacctcagctcttgagtagctaggactacatgcacgtggcaccacacctggctaattttaaagtttttttgtagagacaggcctcactatgtttcccaggctggtcttgacctcctgggctcaagtgatcctcccgcctcagccttc

SEQ ID NO: 94273 - DNA, 25876 bp, Homo sapiens
  misc_feature (1)...(25876): n = A,T,C or G
tttatacctattttttttcttgtctcaatttcatttagttatggtgtgaccattcttatttcttttcttctgctaactttgggcttggtttgctcttatttttctagttccttagaagtgactttaggtggtgagtttgaggtctttctatcttttcagggagggtttaacactataaatttatctcttagcactgctttcccatatccgagagattttggcatgttgtatgtctattttcattcatttcaaaaaatctgttgaattctgaatttcattctttacccaaaagttgttcagggacacattgtttaatttttcatgcacttgtatagctttgagagttcctcttgatattgatttctagttttattcaactgcagtctgaaaaaatacttgatatgattttgagtttttaattttattgagacttgctttataaccaaggatgtggtcaatttttgagaatggttcatgtgcaggtgagaaaaatgtgtattctgtagttgttaggtagaatgttctgtaaatgattatgatgtccatttggttcatattccagcttaagtccagagagttttttttttggctgattttctgtctcaatgatctgcaacatttataagtggggtgttgatgtcatttactattattgtacttctcccagtctgttttcttaggtgtagtagtatttcttttatgaatctgggtgctccaatattgaatacatttatatttaggatggttaaatcttcttgctgtatggaatctttataatataatgctcttctctgtctttttaaaatatcattggtataaaagtctgttttatctagtataagaatggctagtcctgcttgctgacattgatatatcatgtaaatgaaaacaaatctgtaggtgtcattagacctaatggtagatctcctgtagataaaagctgttgggtcttgtccttttatcaaattttctgttctatttcttttaagtggaggatttaggtaatttatgctcaaggttaacctagatatatgagcttttgtttctgtcatggtcttgttagccaattgctttagagactcaattgtgcaattactgtatagtaattatgacctgtgtacttcatgtccttttatgatggtatcataatatttttatatttaagattcctctgagcatttcctgaagggctagtctagtggtgacaaattcccttaaaatttgcttgtctgtgaaagatgatttctccatttttttctataaaaaggctaaaaataggcccccaatatcttccgacttttaggttttctgctgttaaatctgtttagtataataggattttctttagaggtgatttgtagcttctctgtagctgcttttaaaatttgttcattcttattgaccttgggtggtctggtgactgtatgccttgtcgatgtacatttagcatagtatctttcaggtattctctgaattttttgaatctcatttctaaatgtctatcaggataaagaaaatatttctgcattatttcttctactatgtttttcaaacttcttacttctcttcatcttccttagaaatgcttattagttgtagatttgatggctttatataatcccatatttctcaaagcctttgttcatttataacaattattttcttttttaaatttctgactggattaatttgaaagactagtcttcaagatatgaaatgctttcttctgctggtttagtctactctcaaagatttaaactgtattttaaaattccttcagtgaatttttttgttttcaaatttttggttttttcccaaaataagtatmtctttttttctttccttgattgcttttgtagtttctttgtgtttgtttttgaccttctctggatcttattgagctttcttataatccatactttgaattctatacctgacgtttctcaattttattttgattagagtccattgctggagacttagtgtaattttttgacagtaccacaacattcagattttttatggtgcaagaattcttgtactggatttttttctcatttggagaagccgagagttcttggtttgaatttacattcattccgatggaattcttttctctatttttgctttatacctctgcccttgagggtgtgattgtagagtgtcatgagtagtgtattttggctttgcttcaatagccctatggcacttgtgttggtaggtttttacattgagttgcgcagttcaattcacaggccagtagagggtacttatgagtaagagccagctgtgccaaagcagatgggtatatactcgatctttgtttactgtgtgaggctttctgttgtttcaagtgatgggatggaccgtggaatgatcagtgccctgagcttcctattcagtgtgtgacagagatatatctgggtagagctggagtagcttaattacctgcaaataccccagtgatgagcacaggcaccagcccaaagagaggttaccagagaaacttctgttgtaaagcatgaagttctctgtgggggttaggaaactgcactgatccacaacctgggtagtcagtaacacaatctgtttccctaatacatccctgtcttgggccttgtgactctcagttcagatgcacactgctgtctatctccaggccacagtgtagctgagagccataaaataaaaaactactgtcccatagctctctaaggaagtgataattggggtagaacctcttcacccagttcaatatagacagctttgtggctctcatgtagtgtgaggtggtaatgctgcttcttcatggagatagaaggagaggctccacctttcagcacttctgtgttggtatcagctatattggtgtcatctggttgggtcagcccagtctcaggaccccagggaagtgatcacatgccagcattgttatactgtgttgggcaattttccaatttcaaatttcacatttcccaggcccctacatggtaatggaatggcatgtatgaggaaagaagactgatgagtggtgatgaaattacaagacaaagtgagactgttctgtcctagaagtcagatgaagaaattgttttaagaaaagagtcaaatgcwattaataggacaagtaagatggagtctcaacattgaccattgggattgactattgacctttacaaagtcaagaatgttttgatagcatgatggaggcaagagtcagaatagtgtgcattcaataaagtgtaggatgagagtaattagatacagagtgtagaacatgttcaaataatggcctgtaaaggggaccagacgattgagcaaccaccgaagaagaaaacggagtaaaatgagggttatttttgtgatgacagtaaaaacagcatgcctgtgtgctcttagggagaacttagcagagagaaaaaaaactgatgatgcaggaaagagagaatgagaattgctgaaattacgtccaaattagttttctgttcctgctgtaacaaattaccacaaacgttatggcttgaaacaccacaaattaattttctcgaagttctggagactagaattccaaagtctggttcaatgggctaatgtcaatgtggccacaggcctaaacatgtatttttcagaacatatctctaatgttaggtaatacatgactgcaattactttgtcattttttatttatgtctttagctttttgtccttcatatcctcatatccttaattaacaatgttttttgtgtatgatttttaataatatttgtattcctttctcaattgctcttttatttattctgtagttattttctttgtagttactcttgggattatatacagcaccctatagttataacaatctactttgaaagcaatgccaatttaactgcaatcctatacaaaacttcttccacagcttcgtttccacttcacattattgatttcatgaattacaaatttatacattgtgtacatgttaacatagatttatacttacttgtacacatttgtattttaaacgttgaagaagtgtagaataaaaccaaactttcaaaaacacatattttcacattttgccatatgtatacctttagtaaagggcttcatacttctatatggtttcaggttactgtctaaaatgcttttattttaagctgaattagtccctttaccatttcttgcaaagcagatctaatggcaatggactcttgcagcttttatctcacattgtattaataactttctaattaaaaaaaaatttttgccaaatatagatttgttggttggcagttttatttttaccacattaaatgtattacctattacatccttcaaattgtctaatcaaaaatctgttgatcatcttgaacagaatttattgttctgtacataatacagagttatgtttctcctgctgcttttaagatagtctatttgttgttggcttttagagtttgattttaatgtatgtgggccttggtctctttatctgaactccagttctttaagttactcacatatttagattcatgtctgttgccaatttgagaactttttgatgattgttttcaccacataatctctccacccccataggctcctgcttctccttctcagaatccaatgctgtgtatactacttggcttgatggtgtcctacaagccctttagggtctgttcacatctctttactcttttttttttttttgccttagactcaaggatgtaaaatatcttatccctaaacatgtagattatatcttcattctgctcaaattgctgttgaaatcctctagtgagattttcacttcagttatatcgttcagctccaaaatttgtttggtttattttgtataatttctacatcattgttgatacactcatttttccgtatatgcttttcccaatttcctgtagttctatttccatatttttaattggaaattttagcatatttaagataattgttttaaaacctttctctactaatttcagtgctcatggttcttcaaaaataatttctgtcaactcgttttctttcttataagggactgtgttttcctgtttctttatataccttattattttatttgagcatttcaaaatatagacatttttctaactctatatagatttgttctgtgtcatgacgattatcaactaatatgcttggtatgttcttagtcttagcataagcccaacataaaaccctaaggccttgtcagcaattttctgaacttgtatctgcctggactgtgtgtgcccattagtagttcccccaaatacctactggcttttgaatagcttactatttcaaaaattcacaccccagcttcccctcaatgggttagacggactattgcacgtctcttcccctaatctcttgcccttggcatcatactacatttctactcagcacccccataaataaataagtttattttagtcaatttcagatcacttcttgacgcgtccatgagacaagtaggggccttttgatccaccatattgctgaaatcactctgtaaaagctttcaatgattttatattatattgtatcaatgtataataattaacttatttctcaacttactttttggttattatttgaggaaaagtaaatagaacgaaatcagggcattgcaagttctgacaactccaagatgttgataatgtattgtgcaaactacattcatcatgttctaatctgccctccaaaggaaggaacaagtgaaaactatcccacatgagaattattcatccatttatatgtaattaatttccagtttttccttacaaataatgtttaacaagatgacagattatataaaatggttatcagttttttggctagttacttcttgatagtctgtaataaacctggttgaagaacaaatactattaaggcactgcttgcatatattaaatgatgtccaaactccaaaaactgttaataattaacactccaataaaaactacaccagaatttctttttatttgcaccctcatcaggattacagctttatcaggactgcatcttcttcagaaatgaatatttmtcttacaacgcaaagaaagaaaaatcaaaataaattttctgattgaaaatgtaaaaaggcaaatatttttacagttttaactttaattttttattgaggaccaactrtttgaaaaattctcattagtcattcctttaaattatgtgtatgtgagagaaagaygtmagatggttaattatttcaaatgatgcagtataaagaaggggsattatcacggcagaaacgaaaaaagatatttgtagctggaggtttttatagtctaacatatggttgctatttgttctacaaatccttttgaataatttaatatagagatttmgaatagaaaataatactttagatagaaattaatgagtttattataaccatatattataataatttacttaggaattctctttgataagaaacaaatgaactgaatgcarttttctccacagaccatataagactgcctrtgtacctcctcctacatgccattggttaaccatcagtcagtttgcaggggtggggggaggggtttcctgcccattgtttytgtaatctctgaggagaagcagcagcaaacatttgctagtcagacaagtgacagggaatggattccaaacascagtgtgtaaagctaaatgatggccacttcatgcctgtattgggatttggcacctatgcacctccagaggtaagaataattccttttagttttcggatttcaaaagaataaacctagtagaagtgaaacccgtattgggttgtaaggttcgtgttcctaccttactctggatgactcactggtctaggtttcytaggctaggagaaaaaagtaggcaatccttgttctgcattgaggtccattcctatggtcacgtactgcttntttttcgtttgtgcactgtttctttcttctgttcatgtctagttcccagcttggcagaatatgtaaaactcagtattgaagaacactgttggtcatctccctctggtggagattaattgcaataggagtgatttctctgtttctacaactgaagaaatctttccatcttccaagaacatacgatccagagaaatacttatagcaaaaattactggatatggtgtgcacaaaactgtcggcagagtatcactgttctgatgggcggcagtgagtgccacccagtattaccggacctggactagagtttccactgtactatttcacttttaaaaagaacttcctgaaagaaaaaaataccacctcattttaagtaaaatctagaacctaacaaaggaaagtctaaattcttagtccttttttgtatgcatcatatttgtatcaaagtggtaggagtggtcttctgacacaaaaatgaacaaaatggagacctcattttctagatagaacttgtattccaagactgtcctcaggctactaagtgtgtgaataggaactaattattgaaatttgagtctctcactttatcgataagttgtgatgatctacaaggatacattttctagaccagtgacaaaagtggtttaatttttaatataaattggcatgggcaggaaatgaaaataacracacaactgaagctccagccttggtaaacctttgagtgttggcacacttaaagactgctctcaaaaaagatttaaaaaaaaaaaaaaagactgttctcaggagatggcggggagaccgttatctagttccttgtaatttcaacgaaacaagaaagcttctttaaatacatgtaaaaatgaaaacagtttatttatatttttgtcattaaaaawtacctttcaaatctttatccaaatttggtcaataagtcagtaattttaaatttcactggaattctgtctttcctgaaagagatagccttattttttatggcagaactgtaccttagtaaattcttacagatttcagtgaatttttaatgtacaaatcgatatcctcagagtatacatctttacccctagtgttcagttctgttgtgtagccagaatgactrtgcagaaaagacttaatagactactattcacagatgctttatttcccaagtgaaccctagttgggtcgatgtaactagcatccagtcaaaatctcaagaactgagacaccaaagaacatctcttgtagacagcatttcccaaatacgatgttggaggaagtctgagtgagcattctgtgtaatatcactgggagagaactcatatgagcttgcaccgtttcccttctatactccatgtgatttttaccatgtataatatcactatattaaaaataattaggactatttcagtcatgttaacttttccaacaaatcactgaatctgagggtgttatktggtacctccataacagtgatcaaccagagattgcctgagactgaaggtgtttctgggatgctcaacctttattactaaccaggaaagactcaggcaaactgagatggacttttcaccccacatacagacaggaggaaaagctgattcttgtataaaagtcartgcttgtgcctgaactacctctcagccacagtgatcaccagatactacctttggttgctcctccaggttccragaagtaaagctttgkaggtcacaaarttagcaatagaagctgggttccgccatatagattctgctcatttatacaataatgaggagcaggttggrctggccatccraagcaagattgcagatggcagtgtgaagagagaagacatattctacacttcaaaggtactgtgtctrtgatgagcttgtgtgcacatgtatttattgtgattgtgtggagatgacaattctatgactggatgagtagttgtgggtgaattttgcttctgggttcaaatttattcacacatactcacatactaaaactgaaatcaaaatcaaggaatgatgatcacttttcattttggctgtgttccaatttatgacctgaaagtccctttacttttttgagcttcagcygagatcagtgtgatttgacatgtgctatagaatcacagagaacaataatcatgttatggtttttcttatcgcctgggtgattttctaagatttcttattattctctcaattgctatctttatcagtgagatagaaagcaatataagaaagctctgggagtattaaataatagacacttaaattgtcctaaattgtgtccagcatagtgagcatgttcaaaacttgttttaccccccttttatgttgctttagtttctaagcaacataaatagctattcttaagcattgggttgaatggatagaagaattagactgttaaaatgagttgtaaactctactgaagataattcaggtaacatcatagttattacttaatactaatctttacattttaagaatttactcctatcattcagtagatgtacaaactatacatccaacgtataataaagtttataaggataggtcagagccaaaggaatcatgagaaggaagagaatatgtttgccagtggtcataaattttgaagcagtaggaaaatatctaaatactagatggcacaaagtaataagatttgctcaagcattcattcaaaatcacctccattctttaacctctgcagctttggtccacttttcatcgaccagagttggtccgaccagccttggaaaactcactgaaraaarctcaattggactatgttgacctctatcttattcattctccaatgtctctaaaggtrtgcagtttgtatgagcataaaattgcgcttctgctgtcattataaacattgtttatctggatagttgaamagagctttttattaggaggatgtagggattatcacacagaagaagaaccgtaagtggaacacctaatttcmtttctttcgagtaaattttgaatcctacttctctaatgcacacctacaagagaagagagtacagcaacctcaaagcctcttcctcaaaaacttgaaattacaatagtctctttcaaggcactgtcttagttgtggcttttgagtccatctcttgggatgttcccagacacagagtttcatgcagttgtggtgcccaataaaactgctgcacatgtgatgcacaatgagtttccaccatctctccccatttcaagctgaagcagatttggtggaagccactatgcatggttcttaaattagaaacccttaatgtggacttgcaaagctttattattctgctgcctcttctttcacaatagagtttgaagctgtatttagccaggaattactgtgtagtgtataacttttgatttaaagttacagaaaactactcaggctagttaatgcaaaagagtttactgagttatgtaaaatgggaagtcaaagacatggctacatttaaggatatgaaatagtctacaaaaatgtatcatttgtctattcttatctctaaactccaacacttttttttattattgttgacccaaactttttcattggtggcgattatggctttggagcagctcaaggctcatggtcatcaccataagacaactcctctgggtctcccaacttctgctgaccctatgtgattcacagtcctgcccaaagactatcaactcttcaggtggtctgataatcctaccgtgtacaagagtacaatccattatttttggatatcaaggtatttccaaatcaaagagaggtacttcaatagaggaaattataagggcggaataaagtgacataagtcaactgtgaaacttgattaagacctagaaaatggtccttttccatgcatataatatttgtaagagattagaggaagcctgtctcctgaatacattccttataccttcatatgtaaaacacttagcacatatcactttctggagcattgtaccacctgtctcatggaggattagtgtccttaaaggtacctggggttacagctatgagtggagaaattaatttgtgacatcattaaaatgacygcttctatttcagccaggtgaggaactttcaccaacagatgaaaatggaaaagtaatatttgacatagtggatctctgtaccacctgggaggtgagtgcttggyggagaggacacagagaaggatgacaaaaagagaaaatctgtttcccaggttcrataggaaagaatggaatatgcaccattagatctagaaattcagaaactttacaagagtagctttggtgagatgaagggaaaaacacaaaaggaatgtttagagagtggggcacaagacttgggggcaaggaggacaggaatctctttccttncttgtgcattaatctatscagtttcctaaggaagagatagaaattcttactcttgctgcctctatcttcttcccctatttgctgtttgaatttttctttttttgacaatcactgctagctattttcattgtcatactttgaaagttgttgctctcacagttctgtcttgcatttacygtgatttgcagccaactgcacaaataattcctcacaacccctttctccacaggccatggagaartgtaaggatgcaggattggccaagtccattggggtrtcaaacttcaaccgcaggcagctggagatsatcctcaacaagycaggactcawgtacaagcctgtctgcaaccaggtgagctcccttggccttctctcctttcggttcttcatgccccctcttcctgtcctattgccaaatatctgtttgttttgtcccagttatctttgtraagtagaagattatctagagagcaaagcttctgtcaagaaaggcgtgaagatttcttgtttgtaccctgcttggaaaagtattagggaaaaattggaatgagtttaatgctgaatcgtgtgtaatatttaggggaggtccatttgatcagggaggcctggaatcatcaattagaactcaaggaaaggtggacttacctctaagctatgaaagatgaccagaaagtgcatgggtgaaggtgatttggagggaatggtgtatagatatgaagctaggaaaagatgaaatgagctgtacgtgaacagagagttagaataagagaagagaggtgctaggggtttacatggaatttggatgtctgaatgcctcttcttgatgtttcaacaattcttgaccaggggcatagatatactaaaaattagctgcagacaatgaaagtcatccatgtcagaaagagaaaaattaggccgggtgcagtggcttacgcctgtaatcccagcactttgggaggcaaaggcaggtggatcacctgaggttgggagttcgagaccagcctgaccaacatggagaaagcccatctctactaaaaatacaaaaaattagctgagtttggtggcacacgcctgtaatcccagctacttgggaggctgaggcaggagaatcgcttgaacccaggaggcagagattgcggtgagccgaggtcacgccattgcactccagcctgggcaacaagagtgaaactccgtctcaaaaaaaaagagaaaaattacctgtttatggaggtaactgttcacagtggatgaaatcaacactgaggaactttagcagaacatagacctgacctatcactgcccatgtcttagtctgctacttctctttggggtctgtcatccaatcagttgtttaaacacatctattctatgcatggttttttcatagcttagggataagtccttttttccccctgagttattgttaatgattccaggcctccttgatcaaattgacttcccccaaatgtcacaaaaaaattcaaaattaaagtcactctacctttttactaatttacacttttttattcttttatacaacttagagccaatgagtaaagatctacaattgaaatgtgaagtgtataaaatttgtgaatttggcctaatgatacagttccatcatatccaaatagaaacattaagaaaatgcagttttaatattagtccttcaattttttattatgataattttcaaactttcagaaaatttgataaaaataatacacgattcaacataaccatttatattcaaaattgttaacactttgccacattgccaaatatttatggcaaatgtttatgtgggtatatctgcataaatacatataatattttcaaaatctctttaaaataaattggaaagatgacaattcacctctatagacctaaataaagtatgtcacagaaatgaagacattcttccagctacagtataattattgtatctaaggaaacgaactgcaatgccctcatgtcgtttaacatccagtctatatttgaatttcccactgtttaatggaaatgtcttttatagtgctcccttttaaaacagaatggaaacaagttgtgagctgatctgttctttataatcataggtttcccattcagcaattacttataatccactgggtgataattcctaacagaagaagtcatattccatgacaaattttcacatatgattgtgtaaacatcactaatacttttgtatttaatggttatttattattgtatttattattttttggagtttttagataatcattttcaattttaaaaccttatttaactattcttacgtgacattttactatgaaaaaaaatccttcaccaaatcaaaatgaagaacaaatattcctcaaagacaaagtttaatacttgcctctaaatatcaatttcctaagagattactataataaccaccaatggtggaggcaaattattttgttctttcttgctctctgattatctcactcattactctggacttggacatttttccttaagatttttaattaattttattaatttttgttagtgctcattcttacccaatgggtagatttttttcttgatgctgaaatctatccaaacatcaccagtgacatttcyttgaaagtagtgcttttgtctttcagacttgcmctcacgagtccttgaccaaattcttgctttctggcacaatctgaagcccaaaggctctaagaatcttactgtatcccagatatggaacttgttacatctccttctagttgtcaaaggtctttggaagscaggatctgwttcatagatgagcttctgttcagaaatggcatttccatttatacttttagaagatatataaaatttatttctatgaaaaaggttattacttgacaataatatcctcagctcaaatataatgctatactgattattattcagcttccttactttcatcttttsaatattaacataactatttcatataaattgatgcttctctcttttggtcaactgcaggtagaatgtcatccgtatttcaaccggagtaaattgctagatttctgcaagtcgaaagatattgttctggttgcctatagtgctctgggatctcaacgagacaaacgatggtaataaaaacaatgggacctttacataaaccttcattttgcagaaaattttttagtcagagcatcctcagtttcctgtagttaagtttyaagtggctcatggagaggaaagagaattgcntttctgacgagatcttggatgatgctgatggtgatgctcgggggcctcgcttgagaagctccggtgcagagtggaygccttagtctgtttagggagcygcctaacaaactaycgscagcctcagggcctcagcstttctgcctttccttccagggtggacccgaactccccggtgctcttggaggacccagtcctttgtgccttggcaaaaaagcacaagcgaaccccagccctgattgccctgygctaccagctgcagcgtggggttgtggtcctggccaagagctacaatgagcagcgcatcagacagaacgtgcaggtgaggagcggggctgtgggcctcaggtctcctgcacagtgtccttcacamgtgtgcttcttgtaaggctctcaggacagccttgggccagctccatttccctgtatttcccatatgaatgctttgcgtgcatcctgagggtttcttctactctaccacgggagaggcagcacaggtgcagagaattaagatgggaccaaaaatggagatttttttatttcagcattaagttgacaatctactctgcatccctgcaccaggaacatcattttttcatgttgtttgtttggttttggttttttttttttgagacagagtctcattctgtctcccaggtgggatgattctcctgcctcagcctcctgagtagctgggattacaggtgcctaccaccaagcccggctaatttttgtaatttttagtagagaaggtatttcaccatgttggccaggctagttccaaactcctgacctcaggcaacccacctgctgtggcctcccaaagtggtactacaggtgtgagccaccgctcctggcctcctcttcatcttcagaaatgtggagtagcattaggtgttctttagtctaccagtcattgtggattttttatttccatttcttcgtacgctcagttaaaatttcacatatttattcacttggagttttctgtttgtgtactgcctgtttaagtctttctttgactcttagttgcttgtcttttttttaagtataggagaccataattatactattaaatagagctgttaaacaaatcaccctcaacataggggtttaagatgaaaaccactgatttactcaggattctctagttagaaaattagcatggcctcagcctgaacttagtcaagttctgttcttggctgggctctctcatgtgtttgcaggacaacgagatagctctgcttcaagatgtcaatgggacatttgtctgggtgccattttctcctccatatagttcatcctgcagccatccagcccagacttcacctcagcacatggcatgaccccaaggcagtgagtggacacatgcaaagccttttcatgtctaggctcagggctgccacgccattgcttctggcaaatattacccacattacaggacaggccagactcaagggatgggtaaacagacaccaccacttattggaaagagctagaaattcatataaccaagcaagtggatacagggacatgtgagtgttggaggaagtgtttcttattaatctatgatggattaatatatgataggttaatatatatgatagattgatatatatattatagtttaataagatatatgagatagattacacatacatacatatatatattctgggtattaatcgtttagagatttagatgtattattgaagtaccacctcccaaattgcatatgtgctgtggttttctctgtagttatgtattcatgaacaaaagttgctacttttcatgtagttaaattattcatgcctctttcctgtggttgatgagtggcatgtcttttcttatattgggaacatgacaatcttttaatatgttatcttgcaaaattggtaattctctttacttataaattagttgtaaattcaaatgaatttctttttcaatactaagtaaaataaaaacccaaatatgcacatggaatttctaaattgatatcaaaaggtgccaccaacaattattgaaaagcattcacatttgctcacatatcttgattttttacctctaccataaatgaaacattcattcacaaataatattcttgcctctcttttgtcttcaattgacttatttacttttctgtactgtctaaataatgaaaggtcttgctaccagaatggtacaactttttttctaactctttatttgataatatcttgattattcttgactgactattctgttatatgaaattttgaaacatcaacatccatgaaagagtacatattttagtctttggttgatattgtattgaaactgcagttcactgtgaagagaactttttgacaatattgagactttcaacctatgatgaatttccaactatttaaatggctttttaatatatatatcattaattttataacattctccattaaaccatatgtatttttaaatatttatccatagaatactgaaaattattagaacctcttgataacgttttcctttttgttttgtggattttctaatgtgtagaaatgttaaaagaaaaatgtaatgaacaccttttacctagactaattgttaacttgttcatgttttttattctctctctctcattctctgtatcactattagagtgatttaktcaatttatagatttattcaattccatgtgttagcaattagtggcatcctcttgatattttaaagtctctcaaatttagagagtaagatacacttcaagcctgtatctgtttcctttagacatgaaaattgttagtaattagacaattccctgccttgaattatgttgaaaacaaaatgttgtttgcattatacctgtttattaaagagatatagaaattcaacaatatctatcraacttaatatataatcttgttatttaaaaatttgcctctagattcttgtgggccttctaggtacatgaccctatcatgtgggcacaatgtcagcgctgtttcttctccattttctgttgaaattttctctttgtctgcagagttgcrcagtttcaatacataatatctaggaatggatttctgcttatttttcrtgagctattcattgacccacctgartgtttagagctgacttctataactgtttaaaacttaccaatattttaagtattstctctgcaccctactgtctaatatacttggggattcacaactggcaatctaaaaataataaaagttttttatttctgataggtttttgagttccagttgactgcagaggacatkaaagccatagatggcctagacagaaatctccactattttaacagtgataggtaagtttcctttgtaaatgggtgatctaatttatttctrgagaaggaatrtaggatgggtgttgagagtgacctccataccagagggacagaggccaatgtgagtcagaggtgagactggaactctcctgctggattcactccagagctctgttctctggcagggtgagtgggcagggatcagcatgggtcaacctgtgcctctgctctcctgactccatggaactttccagagcagccaacatcattgccaagkctgcacgttccatataggcctggtgtttctaccactggacatgctgtggatactgcccatgtgacttcattagatgtttccaaatctgtgcttatatcacattgtcccaaacctgctcagctccttatcaaatcaaaaacatttccatcaactttgtggtccaggtgccaattcccacctccttcatatggaattgcttgctagatcctgtcaattcagcatcttttattatttcaaatgtttttcctccttctccttgcaygtttgttcatgccccaaactctgcttttgcctccagaaagccttccttagtggagtgaataggagygcttgtccttgatttcctgcaatatggagctctcaaggcagagaatttaaaaaaatttaaaatcaaggagtgtgagtgtggaggcagaagctccattgttgtatataatttgtagctgataaaagatctttactattccttcatggtctaaggttctaggattcatagacggtcattcatgtaaatgcaggaaaagcaggaagttatggccgggcrcagtggctcacgcctataatcccagcactttgggaggctgagrtgggcagatcgactgaggtcaggagttcgagaccagcctggccaacatggtgamaccctgtctctactaaaaatataaaaattagccaggcatggtgacacttacctgtaatcccagctacttggaaggctgaggcaggagaatcgcttgaacccaggaggcaaaggatgcagcagtgagctgagatcacaccactgcactccagcctgaatgacagagtgaggctccatctcaaaaaaaaaagcaggaagttatgtaactgctggcagtggaaattttaacaagtgatagggtgagatagtgtgtgaaaaagcataagtacagtggcccttcataagtgcttaaaaattggtagatatcattgttaatatttttttagtttcaaggaaaataaataataaaaaaaggaaaccatgtaaaagaaaggaagagtggcgagcatgagtaattcttatcatccattaaaaatgtaataagttggtgtttatctgttcctttatatttcatgttatttctatataagaatttttaatgcactgtagctccttggatattagaccctatatcatatataacaatttacatttctgaaycttacaaaatatattgcatacagtagacagtagcaggtaataagtaaagtaacaaaagaaagtataatcagagtatctctgctctgctgacagatgtacaggaatatacytgaatatttgactytgtgtgttttacgtgttaacttccagataagggaatatgattgaataatttattattttgaaaatactgtattatgaagccatgttcataaaggtaagaaaggcagattctacaactagtcagacaacttaacattcatactaatgacagcttcattgaaatcactttactactcccctagtaatggagtcattgcatttatattatacattattctcttttcagttttgctagccaccctaattatccatattcagatgaatattaacatggagrgctttgcctgatgtctaccagaagccctgtgtgtggatggtgackcagaggacgtctctatgccggtgactggacatatcacctctacttaaatccgtcctgtttagcgacttcagtcaactacagctgagtccataggccagaaagacaataaatttttatcattttgaaataattgaatgttttctcaaagattctttacctactctgttctgtagtgtgtgttttcttctggctcagaagtgtgtgtgtgtgtgtgtgtgtgtgtgtgctttcttctggctcaacagggctaaaaactgtgtgatttgcctgtaagttaggagtgggggaataataatcatttatagacatactatagtgggactgcagtagagttttcagcctctagagaaggagcaggtgacaggtgtggatcagttagtgcctctttagctctttcaggaagaactcgcacagcatgaactctggaaggtaagcgatattgacaggatgaccagcaatccacaggctccctacagcagcgcaagggtcagagctcctggagcctggggaggaggcatccctgtgagaggggtggtcagggcacccaccaaggagaaataattgaaagaagctatgggggaggttaggagaagggagtcaagcccatctctgcttggaaaatattggcactttttttgataatcatagttgtaaataaaacactgaacaatgtttttaaaaaccgcagagctgagagtcctgccttgacccccccaagtgggccctgtgacaccagtgcccttggggggccgtggtggggcaggacaaacaatgaactatgtgtacatatgtatgtgtgcatgtgtacgtatgtatgtgtgcatatgtgtacaatgtatgtgcatatgtacacgtgtgcacatgtgtatatatgtacatatgcacacatgtgtatatgtgtgtacatatgtgtgtgtgcatgtatatacatatgcacacatgtgtacacatatttgtatataatatacaartattatttttgttttatacataaaataaggtacactatcaaatatgaaacacaaaatatcccaaagtcattacatagtactgccaaattaatattaaaatggtaggtaatacatctaatccaattttcaaaaatctcaaacatcttttgaaaacattacgtggaaaataaaaacattatgtggaaaatagcatgatgcttttaaactttggtaacttttaggaccacctcttacaaagacatgtaattattctgcagtttttaggggtataaatttcatcagctaatcatgaggatgcaaatttttatttcagatgactctttttgaaaacttgggacaatgtcatggcctattgattaaggcattttgagaagaacagtgttytttaacctgggcacactttctaacacattcattctcaactgttcttatgctgttggccaccttaaccccatcaaagccatgtctctcagctgataagcatcccctcaagtttcatagtaaccacaatcttttcttaaattatttgttcctgaaaattggaaaaagccatacactttggagttccctatgccaatttttgggtgattttctgtctattgtcattccattgataatcttacatattttctggtttacataccacttataggccaagaaacccccaaacagtgtctctagctctgcttttttccccagactcctgaatggaacatgaaattatctactctaacatccctacattagtgtctaacattcactgttggcatgcctcaaataaaactgatataaaccactgtcatcctgttccaaatcaactttttttactctaatgattatttcacatctgctgaagttgattgacatagttattaaagaaacattcatttttttgaacttagtagtcaagtgtataaagccaaaggaaaatttttaatttcttgagcatgcagaacatttctttttttaagatgtgaaataattattagggtggttatttgtaactactaaatttgctagaggcttattccaattcttcaccctccatttccacttcctatttttaaaagaaagtttctcagaatttcataaagttcaatgcctggcttcaggaaccgttggaatgtaaccaaattctacagaaactaccaatcctgttttctctacaagaaatgctggaagacgggtatttctgcatttccatctgaggtaccgggttcatctcactacggagtgccagacagtgggcacaggtaagtgggtgcagcacaccgtgcgagagccgaagcagggcgaggcattgcctcactcgggaagcacaaggggtcagggagttccctttcctagtcaaagaaaggggtgacagacagcacctggaaaatcaggtcactcccaccctaatactgagcttttccgacaggcttaaaaaatggcgcaccaggagattatatcccgcacctggctcggagggtcctacgcccacggagtctcgctgattgctagcacagcagtctgagatcaaactgcaagacggcagcaaggctgcgggaggggcgcctgccattgtccaggctcgcttaggtaaacaaagcagcccagaagctccaactgggtggaggccaccacagctcaaggaggcctgcctgcctctgtaggctccacctctgggggcagggcacagacaaacaaaaagacagcagtaacctctgcagacttaaatgtcccggggtctgacagctttgaagagagcagtagttctcccagcatgtagctggagatctgagaatgggcagactgcctcctcaagtgggtccctgacccctgaccccygagcagcctaactgggaggcaccccccagtaggggcagactgacaccacacatggccgggtactcttctgagacaaagaggagttagactcttaaagtaaagagttagactcttaagtaaagacttagactcccacacattaataatgggagactttaacaccccactgtcaacattagacagatcaacgagacagaaagttaacaaggatacccaggaattgaactcagctctgcaccaagcggacctaatagacatctacagaactctccacccaaaatcaacagaatatacatttttttcagcaccacaccacacctattccaaaattgaccacatagttggaagtaaagctctcctcagcaaatgtaaaagaacagaaattataacaaactgtctctcagaccacagtgcaattaaactagaactcaggattaagaaaatcactcagaactgttcaactatatggaaactgaacaacctgctcttgaatgactactgggaacataacgaaatgaaggcagaaataaagatgttctttgaaaccaacgagaacaaagacacaacataccagaatctctgggacacattcaaagcactttgtagagggaaatctgtagcactaaatgcccacaagagaaagcaggaaagatctaaaattgacatcctaacatcacaattaaaagaactagaaaagcaagagcaaacacattcaaaagctagcagaaggcaagaaataactaaaatcagagcagaactgaaggagacagagacacaaaaaacccttcaaaaaattaatgaatccaggagctggtttttcgaaaggatcaacaaaattgataggccactagcaagactaataaagaaaaaatgagagaagaatcaaatagacgcaataaaaaatgataaaggggatatcaccaccaatcccacagaaatacaaactaccatcagagattactacaaacatctctatgcaaataaaccagaaaatctagaagaaatggataaattccttgacacatacactctcccaagactaaaccaggaagaagttgaatctctgaatagaccaataacaggagctgaaattgtggcaataatcaatagcttaccaaccaaaaagagtccaggaccagatggattcatagccgaattctaccagaggtacaaggaggaactggtaccattcctactgaaactattccaatcagtagaaaaagagggaatcctccctagctaattttctgagaccagcatcatcctgataccaaagccaggcagagacacaaccaaaacagagaattttagaccaatatccttgatgaaccattgatgcaaaaatcctcaataaaatactggcaaactgaatccagcagcacatcaaaaagcttatccaccatgatcaagtgggcttcatccctgggatgcaaggctggttcaatatacgcaaatcaataaatgtaatccagcatatacacagaaccaaagacaaaaatcacatgattatctcaatagatgcagaaaaggcctttgacaaaattcaacaacacttcatgccaaaaactctcaataaattaggtattgatggcatgtatctcaaaataataagagctatctatgacaaacccacagccaatatcatactgaatgggcaaaaactggaaacattccctttgaaaactggcacaagacagggatgccctctctcaccactcctattcaacatagtgttggaagttctggccagggcaatcaggcagaagaagaaaataaaggttattcaattaggaaaagaggaagtcaaattgtccctgtttgcagatgacatgattgtatatctagaaaaccccattgtctcagcccaaaatctccttaagctgataagcaacttcagcaaagtctcaggatacaaactcaatgtgcaaaaatcacaagcattcttacacaccaataacatataaacagagagccaaaacatgagtgaactcccattcacaattgcttcaaagagaataaaatacctaggaatccaacttacaagggatgtgaaagacctcttcaaggagaactacaaaccactgctcaatgaaataaaagaggatacaaagaaatggaagaacattccatgctcatgggtaggaagaatcaatatggtgaaaatggccatactgcctaaggtaatttatagattcaatgccatccccatcaagctaccaatgactttcttcacagaattggaaaaaactactttaaagttcatatggaaccaaaaaagagccctcattgccaagtcaatcctaagccaaaagaacaaagctggaggcatcacactacctgacttcaaactatactacaaggctacagcaaccaaaacagcatggtactggtaccaacacagagatatagatcaatggaacagaacagagccctcagaaataacgctgcatatctacaactgtctgatctttgacaaacctgagaaaaacaagcaatgggaaaggattccctatttaataaatggtgctgggaaaactggctagccacatgtaaaaagctgaaactggatcccttccttacaccttatacaaaaatcaattcaagatggattaaagacttaaacgttagacctaaaaccataaatccctagaagaaaacctaggcattaccattcaggacatacacgtgggcaaggacttcatgtctaaaacaccaaaagcaatggcaacaaaagccaaaattgacaaatgggatctaattcaactaaagagcttctgcacagcaaaagaaactaccatcagagtgaacaggcaacccacaaaatgggagaaaattttggcaacctactcatctgacaaagggctaatatccagaatctacaatgaactcaaacaaatttacaagaaaaaaacaacaccatcaaaaagtgggcaaaggacatgaacagacacttctcaaaagaagacatttatgcaaccaaaaaacacatgaaaaaatgctcatcatcactggccatcagagaaatacaaatcaaaaccacaatgagataccatctcacaccagtttgaatggtgatcattaaacagtcaggaaacaacaggtgctggagaggatgtggagaaataggaacacttttacactgttggtgggactgtaaactagttcaaccattgtggaagtcagtgtggcgattcctcagggatctagaactagaaataccatttgacccagccatcccattactgggcatatacccaaaggactataaatcatgctgctataaagacacatgcacacatatgtctattgcggcactattcacaatagcaaaga

SEQ ID NO: 94274 - DNA, 24100 bp, Homo sapiens
tggactgagctcttccgaggtgcgtcctgggcaggaggggacagggaaggtgccgggtgggcacggatgcatgggggaggagggtgcccctgcccaccacacccgtgctgcccacaggcctgggcatgaccctgagctacctgttccgggaaccggccaccatcaactacccgttcgagaagggcccgctgagccctcgcttccgtggggagcatgcgctgcrccggtacccatccggggaggagcgttgcattgcctgcaagctctgcgaggccatctgccccgcccaggtgagcccctgccccaaccggccaccacgccagcccctgccactgggagagggaggccaggcagccctaggcccaaaccctagcccctgcttgatgtgcgtccccaggaagtccctttccccctctgagccacttccctcgtgaatgggaatgatgagggcttgttaccagagcacagagtcagtgagttggcagagtgaagcttccagccctgggcaggcgcctgacacacagaggttcccccttggggtctggccaagggtgtgacccctgggcctctgagccatggggtgacacctgaggccatccacgcctccctggatgtagccaccgtttccggagtcctgcttgtgtgcctgttgcagcttcccttccccagtggctgctcccctgaggcccggctttccgttctcttagtgggtctcgtgcttacccgtgggggccaggcctgccagcacgggaacaatatgactcggtcagagctctggtcagacccctgtgtgtgcctggcaggagccccggcagccgccgtcgctactttctgtgtgcacagcaacccctcccagtgttctgtgactcgggtggctcctgtccagatcctagtttgtcctctggagcactcccaggtcctccaggccatgagctgcggccctgatgtctctactccagccacggactgagagtgcataggagtgtccccaaacagcagtcacgatggtcacaaccttggcttccagacagtgagtgctgtccacagacagacccgttgctgtgccatgtgtgtgactcacagcctctcctgtaatctccacaacccctcgaggaggtcgaggttattgtctccatctttataagcactaaaggatgagcctgccagccacaggtcccactgtgagttgtggacactacatttctgggatgggggcatatgagagtccttgccaagcacatttgaaggttttcccagccagcccctcccccagcgggctacccaggaactgagagttaggacgtgcccttgagtttgggctgtgcccccacttgctgtgtagctttggggagcccctcaacctctcggaaccttgtttttctcatccatcaaatggagagaagtagatttaaggcacaggattgcacccaacagtgtaggcattcttggcgatgttgcaggttcggctccagaccatcggggtaaactgagtcacacagctgttttggttttccagtgcatttaaaagttagatttagaccgggcacagtggctcatgcctgtaattccagcactttgagaagccgaggtgggcggatcacttgaggtcaagagttcgagaccagcctggccaacatagtgaaaccccgtctctactaaaaataacaaaacttagccgggcacgttggcaggtccctgtaatctcagctacttgctaggctgaggcacgataatcacttgaaccgggaggtgggggttgcagtgagccaaaattgaaaaaaaaaaaaaaaattagggccggttgcggtggctcacgcctgtaatcccagcactttgggaggccaaggtgggcggatcacaaggtcaggaattcaagaccagcctggccaacatgttgaaaccccgtctctagtaaaaatacaaaaattagccgggtgtggggttgcacacctgtagtcccagctactcaagaggctgaggcaggagaattgcttgaacctgggaggcggaggttgcagtgaactatgattgcaccaccatactccatcctgggccacagagcaagacttcgtctcaaaaaaaaaaaaaggatttacactgtactgtaggctgcgaagtgtctaaaacacaatgtatataccttaattaaaaatactttaggggccaggcacagtggctcacacctgtagtccaagtgctttgggaggtcaaggtgaggggattacttgagcccaggagtttgagaccagcctgggcaacatggcaaaaccccgactctacaacaacaacaaaaaatacaaaaaattagcccctgtaggcccagttacttgggaggttgaggtgggaggatcgcttgagcctgggaggttgaggctgcagtgagctatgagctgcaccactgtactccagcctgggtgacagggcaagactctgtctcaaaaaacaaaaacaacaacaaaaactttattcctaaaaagtgctgacccagagataagaagcaagcacatggttggtaaaatgacatcagtgagcttgctttatgcagggttgccccaaaccttcaatttgtaaaactcaaaatatctggaaagcttggtgaggcgaggcgggactgtaactcagcactcaccgcagggtgagacccttagggcagcgggtgctacactgaacaaagcggtgaacagccccctcgtgagagggggttcttggcagatgacgccagcagctgacaaacaggcaaggcaggccgggcacrgtggctcacgcttgtaatcccagcactttgggagtccaaggtaagcggatcacaaggtcaagagatcgagaccatcctggtctacatggtgaaaccccatctctactaaaaaatacaaaaattagctgggcgtggtgatgcacacttgtagtcccagctactcagggggctgaggcaggagaatcacttgaaccgggaaggccgaggttgcagtgagccgagattgtgctgctgcactccagcctggcgacagagcgagactctatctcaaaaaaaaaaaaaaaaaaaaaaaaaccagcaaggcagggacgccagcagggcacgtgctgaggagacaggcgcgagcaccagaggtgcagggcggcctcttagccggagtccaggaggcctttgaggggagagggcttctggcagaccccaggggtggggatgagcagtgacaggggccctgggggctgggatgtgacagggcagcgtggcagtgtctggtggcccctcccgcaggccatcaccatcgaggctgagccaagagctgatggcagccgccggaccacccgctatgacatcgacatgaccaagtgcatctactgcggcttctgccaggaggcctgtcccgtggatgccatcgtcgaggcacgtgaggcccccgggtgggagggggcctgaggctcctcagcagggcctaaccaccgtccctgcacctcaacctgcagggccccaactttgagttctccacggagacccatgaggagctgctgtacaacaaggagaagttgctcaacaacggggacaagtgggaggccgagatmgccgccaacatccaggctgactacttgtatcggtgacgccccaccggcccgcagcccctgctgcccaataaaaccactccgaccccacggcctcttgtcttgactctggtggtccagggtggggccgttcccggcctgcctgaggcctgtggtgcctccaactggactaggtcgccacctagtctttatgctctctggagtcctgctgccccagccctgccttcctgtagactccagggccccaccaggctctcatggctagaccacaggccgcagcatccctgtcaccctgcctcttcctgggcgtcttccccaaggcccagcgatgccagaggtcaccacagacctgccgttcccactctcccgggtgtcctggctggggcctgggcctcctgtctcccaagagccatccacttgtaagacgcttaggacttggagcctcccaagacctcaggctgaagaacagcaagtggcagaaactcaggccggggcatccttgctgggggtaggaggaagcctgcttggggtgacagtcacacgagggtgacacaggccctgctggccctgagctggcctgcgtmcagccacatcctctttcctgtgttccctacgccagggtgctggcccggccactgctcaccacttcctgctttgctggcccagcgacacggtggggtttccctagggccacacacaagccccttgcccatataatggccaaaagcagcccccctgaacttgtgctaagtactgtggaaggatttcacttcatttgcagtgagaaaaccagctccgagaggtgaaagggcttgctcagggccatgcagggcacatcccataataaaactcagttcagagaccttgaccccccccatctaccatcatttccaaaagtgctttttacaaagcactactttgtaaaaagctacttcttcgaaagaacaagtttcctggcccagtgagtgttggaaatgctccagctgctgtgtgcctgctggcaggtactgcatggtagacattcaaggctctgagaaggcctgcagcaaaaacaccagcctctcccagcccattcccagggagcttttctcaggtctaacacctgggcctccttcctagaccaggcattgccatctaatgccaaagtggccaggctcccgcttgggccccacagcctgtggcactggggtgagaagtaactgcaggaggcgaggggaagcctggagcccgggaagtgtccacaggtctggcccgcagctcatcttggccactgatgaaaacaggtgttctttccaaaaacaaggcaggcgcaggactcctgaagcaccgccggtttagcttttcccagacgtaaccgccrtcagagcgtggcatggagcctgtagctgtgcactgaatacttctattccaagcgggtcagtctttccagctcaccgctgggttctttcccttaccgtggtctcccaggcacttactgctgagaccccactcaggctgtctggttgtatcaggccccgaccctgtcagaacaggcctatggcrcccaaccacaagtcccccaattttctgaggaaccacagctgagcttggctgtgactcagtttccaggcccggctctggggctccacttgtccacccctgccgcagccccacaggcctgtgctcgctgtgtggggcttagggatcaccagagctgaagggcccctggcctccagtgggaatgccccaggcctgtccaaagtgcaggcagctggacggtcgtgagtcccagcttccaggcactaggacctgatgacgcccatggtgctgacctggagcaaggtcacagtgacacccccctctaccccccgcggctgcagctgcaggtggagctgacagctggcctctggccccagggtatctcccagggcctgctgggtgcggggcgctgggcagaacaaggcagcatggcctggccctgtgtcctgctgccagtgaagcaggcccagagtggggcagccacccacccaagggccagagcggggcctctccagggtggtcaagagcaggaaggtgtaagcaccggcgggtttcactgccgcccaagggaggggtcccggaggtgggggagcatcctggggaccccaagcccatgagcctgcgaatgttggggtcccatcagccagaggcgcacaagcctcgaagtgagaggagagcagggtctcatctcctatcctgagctgggcctgagcggagctgcccctgcatcggggccagcatagacgcgcgcggttggcagtggtctgttatccgctcctttctccaggcctcctctccgggattaagcgcctcaggacccgtccgccaggccacagcctgggctcaacctctcccagacttcctggactccagtggagccttgggccgggggcggggcgtccctggcccctcccccgtcgtcccgcctgcccggaaaggagtgagcggcgcctagtcccgggctggcgggagtgcagttctgagtcccgcccggcgtgcgcggagcggggcagccagcagcggaggcgcggcgcgcagcacacccggggtgagtgcccctgccggggtctgcggagccccagaatttcctgcccaccctcttccccctgccccggggaggagatcctggcgccccacccagttggctccgtgaatgcagctcagmccgccaccccgcagggtgtcaggccttgcggggggccacggaggatccccaagggaggaggagaaggatggggtgtttaccaacacagcccagcgttcccgggcctggtgtgcgcggagctttccccgctgctgcttccttggagggagggacccattctacagatggggaagctgagaccacacaactaggaagtgtcagagctggagaccagctgggtcatttgactccagagcccaccccatttggaatggagggggcgccagaccctctcctactgccttcccatcatctggaggggagggcagaggtgcagagagacctgctgggttcctggaggggccaggaaaggggcacagggtgaggagtgggctggagcctggaccccagggccgcaggatggaggcgtattcatttacaccataaaagtggctgggtgacccctggctagagcggggaccaagggggacaggggtagggggtgagccagtggagcctcacatgccaggcacgggggctgatcacgtccccacacctttccccccgcccattacaggttgttcccccaccccctgggaagtgctggaaggagcccggccctcgagccctcggcatagtggctgtgggagccctgatggccctgagccaggggtgacccctccccagatccccagagctgattccccacacctccttatttggccagcacagccccaaagggagccaggtcagacacaaccctcctctgagctcaccctttgtgctgggcacataacattggactttacctctccaagtgtcagtggagtcctgtatgaaacaaaagcaccgtaccccctccccaagggtttctccccccagggattagtgtgaggtcgtgtggatgaagggattcagttgaggctctggttatttttgtcacctccctagatcctgtctctgtcaggggtgccacgtcccattcacccaaagaggaagtagaggcacagagagggtgagagacttgcccaaggtcacacacccaatctcagcctgggctccaagtccctctgccctgtggccgggcctggtccttagggatggaacccagccccgctgccccctgccctgcccacctgcagccttgggccatctgctcagtgttccctcgttccctccttctctcctttcccaggctggggctggggctgcgtttccctgtttagagttaagtaaaccagacccaggggaggaagtgactggctgggcaggcggggccctgaccaggcctgtcccctccccctaattttcgagctaagcaactgattcccacagaggggccctgggccctgagagcagtggctttggagctggaggggccccagcatccagggcgggttggaggtggcctggcacctgcccccaccccacatcggccttgagcaaggccccgggcccttccccgccattctgtagtttcacttttgttggtttcaacacctggaaggctgcggctgctgccgggcggcccgggcctcaggggacagcccccccacagcagtgctccctggctagccccagggtacccggtggagatgcccgctcctaccactcagcacatgcagctccacagggagcagcgagggctccagccacccccggggcagccctgggcctaagtgcctgggccagtggggtcctgtctagggtgacggcagcccgagaggagggaggccagagtgaaggtgggggtggagccggtgtcactgggagacgctggaggtaggggcgggggtccccatgggcagagcaagccaggagagagcttgaggtcggcctgagggtgggcttcggggtctcccagtcccactgcttactttctgcgtgacctcagcaccgcatcaagcctgcccaggcctcagtttccacctctgtcagatgggggtggtaacagcagcttccaggattcagtgagtgaaggtgcacaggtgcccgtggttgggaactgtctgtggtctgcccctgactggcccccatccgtgtccacccacaggaccatgggctccatgttccggagcgaggaggtggccctggtccagctctttctgcccacagcggctgcctacacctgcgtgagtcggctgggcgagctgggcctcgtggagttcagagacgtgagttgggtgggcaggcgtgggaagggggctactgccaaggttagcccggaggccggtccaggatggggactgcccccccyccgccatagggccctggccccatttgaaccccagcggcccctgccatgggcactgctcatgggaagcccgcagctgaggcccctgagctggctcctccccataccctcctggggcatggggtctggtctgtgctctgatctgcgtcttgtggctcccagggcactccacacctttctggaggaggcagctaaggcctggggagagtcaggcctgggctctagggtgaggagctccctgacccccttcccgggacactcacccctccgtgtggcacccacagctcaacgcctcggtgagcgccttccagagacgctttgtggttgatgttyggcgctgtgaggagctggagaagaccttcagtgagttggtcccaggcctacattccaggcaggcttcctggaggaggcatgggccaagtttgatctgaaaggaagagtctgggtttgccaggtggaaggcagagaagggaggtatatgcagggccctgcagggccaagacagagcagctgggatctgtgaagtgtgcttgcgaaggtggctgccttgtgtgggctgagcagagggcctagggcagggctggctggggaggcctcgaatacagcataagagcccaggacttcgtcctgtgggcgccaggaagccacaggggtttctaagcagggaagaggcacagacagctttctcctctacagctgggctggggtgggtggggcccaggatctagggtagggtacccctaaggagcaggcaaaagggacccctgccctgggcaacccctctcaggaggagcctgtgggggcaccaaggcaggggcatggggcaggcagggttttgtgtttgctggtgcagtttacagcttttcaatgatcaggcagacacaggactcacgccagctccggtcccaagccctgcagcgcaagggccggcctgtggggagacctcaggccctcttctgagtggtggccaagggactggggagggagagtgagcccagacctgagctcagggaggggagcacagcttctggatgaaagtttggccgggattttctggccacctccacctggtgaatccagcagctggtggccgatggagtttggggcagcaggtggggccctcaactgttgagacaacctcaactgcaccccactcccgttcctctgcgcccagccttcctgcaggaggaggtgcggcgggctgggctggtcctgcccccgccaaaggggaggctgccggcacccccaccccgggacctgctgcgcatccaggaggagacggagcgcctggcccaggagctgcgggatgtgcggggcaaccagcaggccctgcgggcccagctgcaccagctgcagctccaygccgccgtgctacgccagggccatgaayctcaggtcagctcccrcccaggcaggagactggggggctggggaggggctgtccagcctagggctcatggtgcttctgggttcctagctggcagccgcccacacagatggggcctcagagaggacgcccctgctccaggcccccggggggcygcaccaggacctgagggtcaagtgagtgagggatgacctcatgccctttctggccagcccagaacccctggccagtcgctgggctgggccaggctgagctccgactccttgtccagtgctctccccaggctggccccgcctcctccttcaggcccggaacttcccacagtcccaagccctagccctagggggttctcctcttctggtcctgcccgggaggcctcctgccttcccctgtgggcagggccagtgtgcccaattgcccgattgcccgtgctgggcagggtcctgcccggggggcctggtgggggaggcagggcaggaggttggagcagccctgcccagccccgtggccgccagctttgtggcaggtgccgtggagccccacaaggcccctgccctagagcgcctgctctggagggcctgccgcggcttcctcattgccagcttcagggagctggagcagccgctggagcaccccgtgacggtgagcagctggcgctgggctggggggtcctgggcagagcgggaccccagagtcagctgagcctgctctgcagggcgagccagccacgtggatgaccttcctcatctcctactggggtgagcagatcggacagaagatccgcaagatcacggactggtgagtcactgggaacacccgccccaccgccctgctccccaggcccctgctgtcacctcccagcccgccctatcgtgactcctccccatgagctcccttcagactcagagtctcgtagctgtgtccttctggcccctcacgcagcgcatcctccctccagcttccactgccacgtcttcccgtttctgcagcaggaggaggcccgcctcggggccctgcagcagctgcaacagcagagccaggagctgcaggaggtgggtgcccccggccttccggaggcgggtgtaggaggtgggtgcccccggcctcccggaggtgggtgcaggaggtgggtgccctggcctggcctccaggaggtgggtgcaggaggtgggtgccctggcctggcctccaggaggtgggtgcaggaggtgggtgcccccggcccagccaccccacctgcctgcccagcccccgctgactgcccactctggcgcaggtcctcggggagacagagcggttcctgagccaggtgctaggccgggtgctgcagctgctgccgccagggcaggtgcaggtccacaagatgaaggccgtgtacctggccctgaaccagtgcagcgtgagcaccacgcacaagtgcctcattgccgaggcctggtgctctgtgcgagacctgcccgccctgcaggaggccctgcgggacagctcggtgagcagcctgaggcctcgccccctctccgcccgcccctcctaccaggccggggcgtttctgcctcacttccagcctctggctccctgcacctgggctttgcctaggggctccttctcctcccagcctcctccatggcccaccgcttccagggagtctgccctgatggccctggcccagcaagccctaccctgactttcctaagtccctggaggctgcacaggatagttttaaagtcagaagcctcattccaatccaggcccccctgtgaccttaggcctgctcatggtctgtggaaccggtgtgatgcccctgcctccgggggtcacccgccgcgcacagcaggtgcttgcgggtgaggctgggctccttctcctgggccgtccctaggaggcagcatgcttgcctttcccaagcaattgccaatccatgtggtgtctttgggsccccaccagggcagagcagggctgatcatctcacgtcagagagaggggaaggggctgcccagtgagcccccacagggctctacatctccagctgggcctggctggagatcccagggtccctgaaggcccccgccaccgttctggtctgtctctgccctggcacccagatgkaggagggagtgagtgccgtggctcaccgcatcccctgccgggacatgccccccacactcatccgcaccaaccgcttcacggccagcttcyagggcatcgtggatgcctacggcgtgggccgctaccaggaggtcaaccccggtgagagccacggcatccttacccgtgtcctgggaggctcagctgccccactgggtgggtgtgagcctgagggggaggtatctccatcctgggcctggcctgccctcctgggatgaggggcacacatcccatcactctcaaggggctgttgggctctgcagccagtgtgaggctttatgtcggcccccagccaactcccccttgttgagtttacaagggagccggcacgggcttgtgcaaagaacagaggctgtgcggtgggcatggcccaggttggaagcccatctcgcctactttgagacatttcttagcttctctgagcctcagctgcctcacctgcaaaatggaaataatagcgcaaacctcagaggaatgttgggaagcttagtgactgttggagactgcaagctggagccaggggcagcctttggtgtggttgctttggttgcacagctttttttttttttttgagatagagtcttgctcagttgcccaggctggagtgcaatggcatgatctcggctcactgaaacctccgcctcccaggttcaagcgattctcctgcctcagcctcccaagtagctgggattacaggcacgcaccaccacgcctggctaatttcatatttttagtagagatggggtttcaccatgttggtcaggctggtcttgaacccccgacctcacgtgatccacccacacaggccgttgggggcccaagcaccctgactcttgcccactggatgaggcagggcccctccctgtcctgtgaccaagtcccctcccgacatgggctccaccacatcacacccatgctatgggccgggcccccactcagtgtcactgggggcactggggggtttgctgcttctgcagggccagtgtcctggggctggatctgggccccaacaggattcccctgcacgtgggcagaggctggtgcagctagagcatcacctggaggcccgtggcagatagaatgctgccagctcaaagcaccagccgtcggggcagcgtgtttgccagggaagctgtaacaaagtgccaccggctactggcttaaggggcagacacggtcccacagtcctggaggctggaagtccaagaccaaggtgtcagcaggggccgggggcactggctgatgcctgtgatctcagcactttgggaggctgtggtgggaggaggatctctggagtccaggagttcgagaccagcctgggcaacatagcaagcccttgtatcttaaaaaaataaaagatgatgaggtgttgtcagcaggagtggctccttctgaggctgtccaggaagatctgttcccggcctctctcctgggcttggagcggccgtcctcatcttcacacrctgttctccttctatgtgggtccaaatgttccttttcataaggacatcgggcacactggattggggcccactgtaatggccttatcttaacccagtgacctctgtaaggaccctgtctccaaagaaggtcacatctggagttcctgggggttgcgactccagtgtatcttttttggggtcacaacacagcccctgacagtgtgtatgttggggtcctcctgcctcccatgaggacttgttcccattttactgatgggaagtcgagacttcagagctgaagtgaccagctcggcctcccggaacttgccatgtgccagctggggctgcctgtggctccctgtcctctctggcttctgtgtggagctctgggaacagcaacagctgaagctgctaacttcctgtggctccagcagctggcccgtgctgcccgtggagaacttatgaagtggtctggtgttacctgcattttacagatggggaaatggaggctcagagaggtgaagtggctgggccaaggtcacacagctcctaagtggtgggttcttttttttttttttttttttcggagacagaatcttcgctctgtcgcgcaggctggagtgcagtggcgcgagctcggctcactgcaacctccgcctcccgggttcaaatgattctcctgcctcagcctcctgagtagctgggattacaggcacctgccaccatgcccagctaatttttctgtttttagtacaggcagggtttcaccgtgtgggccaggctggtctcgaactcctgacctcgggtgatgcccccccccccccccgtctcggcctcccagagtgctgggattacaggcatgagccactgtgcctggctgctaagtgatgggttcttgactgcaggccagcagggcctccgtggcgtcttgggccgggaggcagatgctggtgtkttcgggggttcccagctcacccacctctgcccacagctccctacaccatcatcaccttccccttcctgtttgctgtgatgttcrgggatgtgggccacgggctgctcatgttcctsttcgccctggccatggtccttgcggagaaccgaccggctgtgaaggccgcgyagaacgaggtgaggggcggggctggggtcctgatgagggtagcagggccaggcarcccctcaccacaccactgcccccccagatctggcagactttcttcaggggccgctacctgctcctgcttatgggcctgttctccatctacaccggcttcatctacaacgagtgmttcagtcgcgccaccagcatcttcccctcgggctggagtgtggccgccatggccaaccagtctggctggaggtgaggcccgggccccagcccggctgggggccccgcagcacccgcagccctgaccgccctcccctgcrttgccgcagtgatgcattcctggcccarcacacgatgcttaccctggatcccaacgtcacyggtgtcttcctgggaccctamccctttggcatcgatcctgtgagtcctgggatggagtgtccgtgggtggtgaaggcagctgggagtgggggctggggctcccctcggttcagccgtcctgcagcgctgtcgctgagcactcctgtgtgccaggccctttcctcagcacaagaggcagacaagcctcctgccctgcggagcctgcatcacagtcccctgagtgtgcggaggcaaagcgagaccagccaggaaccagtctcctgagtgtgcagaggcaaagcgagactggacaggaaccagcctgcagcttgcactgtgccaagcactgttcccaaccctctgtggaagtgattttcttttttcttttttttatttttggatatagagtctcattctgttgcccaggctggagtgcagtggtgtgatcttggctcactgcaacctccatctcccgggttcaagcgattcccctgcttcagcctcctgagtagctgggattacaggcgcccgccaccatgcctggctaatttctgtatttttagtagagacagggtttcaccatgttggctaggctggtctcgaactcctgacctcatgtgatccacctgcttcagcctctcgaagtgctgggattacaggcgtgagtcaccgcgcccagcctgattttctatttgaacctcgtaacaaccccgtgggcctcacattagtagtgtcctcacctaaagaagagactgaggcacagaggtcatgcccaaggtcacccaggctggcaccgtggcagctggcccatctgcgctctgttgcccctcggtgggtgggtgatggatgaggctgcaggctccgagggggaaaacagggtggtgagagagtgactcgggccggggacttcctggcagtgatggcgagggagcccctgagtccagcccacccctgctgccaccctagatttggagcctggctgccaaccacttgagcttcctcaactccttcaagatgaagatgtccgtcatcctgggcgtcgtgcacatggcctttggggtggtcctcggagtcttcaaccacstgtgagggccaaggctgcccsggggacgggaggctggcaggccagagtgggccccagtgagcacacctccctcttgcccgccaggcactttggccagaggcaccggctgctgctggagaygctgccggagctcaccttcctgctgggactcttcggttacctcgtgttcctagtcatctacaagtggctgtgtgtctrggctgccagggccgcctcggcccccagcatcctcatccacttcatcaacatgttcctcttctcccacagccccagcaacaggctgctctacccccggcaggtgggctgcggctggtgggggccgggctcacacggcctcatggggaccccgcggtcacagggccactgggagctgcaagatcctcgtccgagaaacggggatgcaggccccgggccgtgcagacagggccgtcagaggtgatggtgtgcatctttagcaggtggcacaactggcrctgggaaccgggggtcccttccctcaggagtccttatggaggcagaccctcacccagtgagggcacggagcccccgggggccctggagggaggagcgaccgcaggctctctgggccccgtgactgctgtgactcaggttcctttgcaggtgtgcacagcagggacgccctgactctcgccctctccctggcaggaggtggtccaggccacgctggtggtcctggccttggccatggtgcccatcctgctgcttggcacacccctgcacctgctgcaccgccaccgccgccgcctgcggaggaggcccgctgacygacaggtgggaccggggcctaaggtgtggggggctgcttgcggggagaggccactgtccggtgtgtccctgactcctcgcttcctgacagactcctgagtggccaggagcaggcctggcgggtggtgggggacctcctggggctggagtgctgccaacactgcctgctcatgccccaggaggaaaacaaggccgggttgctggacctgcctgacgcatctgtgaatggctggagctccgatgaggaaaaggcagggggcctggatgatgaagaggaggccgaggtgggtgcagtgccttcctgggggtgggacggctgaggccctgccggccctcactgcacccgccccgcagctcgtcccctccgaggtgctcatgcaccaggccatccacaccatcgagttctgcctgggctgcgtctccaacaccgcctcctacctgcgcctgtgggccctgagcctggcccacgcccgtgagtgacctggccaccgacggctggccccagctcctggcttctcacataccgctgctggctgggcgggttgcttctctctgggcctcagtttcccctctgtaaagtgggactgtccaaggaggtccctcgctggccccccgtgcagggagggyttcaggctgcggcaggtaggtagggggctggcaggcacccacttgccgttggcccccactgtctcctttgcttgcagagctgtccgaggttctgtgggccatggtgatgcgcataggcctgggcctgggccgggaggtgggcgtggcggctgtggtgctggtccscatctttgccgcctttgccgtgatgaccgtggctatcctgctggtgatggagggactctcagccttcctgcacgccctgcggctgcactggtgagcgaccacccactggcctgggctgctcaaggcgtgagttcccctcaccaacccctctgcttctcacccccagrgtggaattccagaacaagttctactcaggcacgggctacaagctgagtcccttcaccttcgctgccacagatgactagggcccactgcaggtcctgccagacctccttcctgacctctgaggcaggagaggaataaagacggtccgccctggcagtgatgtctcgtctctcttccctcctttttagctgaggcaggtggcagggtagaaggcatggtgtaggatctgggacctcaaaagtcaaggcctggacctgagcagatctgcaataatgtcagactcttggggtgaaaaggggcagaaaagggccaaggagagatgtttccagcacattctaacttggagtgagcaaatgtcttcccaggccgggtcaggggagtgagctccccatccttggaggtgtgcacctggctgtgagcgggtgtctgggttactctctgttgggagtggtgccaatatccatgccctggtgccgggcctcaggggtctggaagtacagagcagtgtggggcacctgagccccggccagtgctccatgcagggccatggtgtcacacgcccaaggccacacacctgccaggaagggtagaggctgtccccagcagcagacattacccaggaccccggggttcagaacaggggctgagcctgactccaggcccagcctcccctcacctgagactacagtcttcctgatccctcccaggtggtccttcctgcgttgctggcagaatgggggtggctttctgcagttccctctggcctgggtcccacccccactgggaggcagaggaagtgcttcccagaagccaacaagctgcaaagtggttcttcccacagctgtggctgaggccagctgctgggaggagcctgtccattggctcctggactgctttgctcaggacctctggatgccaggggtcgtatcaggggctctaaggtaattccacatgcccagcagattcagcttagagaaacggtgctcacagtgctggggtaggagcagagaaggctaaatgaaggactccggagagctgcaggtggatctggaccaaatccagaacccaacgccttactccctcctggggagagagctgggcagagacttggggcgggcagtgaggtggggataggtgagcagcactcgtggtgagtggccccagtgtgatttaggaggggtgcagtgtgggatcccagggacatgaccagtcagccccgccctggctttgacatgggggtgcctggcagtggtggctagagaagtccagtttgccaagagaatggcacataaggcactggggtgggcacctctggggcatggacatagggagacatagggatggggtgggtcacctgcgtggaggactgggcactgaacagcacaggcccgagcccatccttgtccacgtgagcttatggcctgatgtagagaccaccaggggctccaggaaagttaagctgcatggagagaaacgatgggccagggccgggcccagggtggtttagggaatggcagtgtcctgggtagaataggaaggcctgagactgtgactgagctgacagtggggcaaagtgaaggagcccagtattggaagatcggctccacatgtatctctgcgaggagactgcaagcgagctcgtgtggaccaggcagaggcgagggctgagtgaggccagcagtggcctgggcacaggaagacggtgagtgagaagccactggagctcctgtgcaggagcgcaacacctttactgcttcattcagtttggcttcacctgcttaaaactgtaactctctagaaggctgaacagcaaaagcctccctcctgcccagccgctcagcatccccaggcaccagcactgctcccagtctccaacgtcctccagggctcttcgcttctgggctagaagcagggaaaccagagtgtgctggggaagaagaggaggaggtggaggagggctgatgatggggccacatgctgctgggatgccagctgagagcagcggagcactgctaagctaaggggctgagtgggtgcagatggagccctccgtgggctccttcaggtaccaggagccctgcctgagattcaggacacatccaagggtgacagcttgaggttgggtttttatttttttatttgtatagtacaatctctgtggtagcagaaatatatgcacaaaaaacaattcaaataagagttcagagtaaaaaaaagtcagctaagactgtatcccgcaggacatttcatatatatggatttcacagctacactcgatccacgccccacaccacatacaggctgctgtctcccacaagaatgatgatgtcaggggcatcaggaaaggtaagggccgggaaaccgggcccttggagaaccctgcccaggggaggcccagcctactcacaggatccgacactccaggcagagcagagggcaggagaggcccaaagagctaggtcaagcagctggctcccctgggaggggagccgggagacagggaggtcctcacactgcccccgtggccacgcatggctgtctgcacactccatcaggaggaagggcaggggagaagtcacatgcagtacagtgaaactcatcagtgtcacacacgcccagcaggaggggagagctctgctccacacgctggcggccttggctgctccagagcaatccgctgctccagcttcagccatgggaccaagagggtaaaggagcagcttctggaggccccaggcagaggccaccttgcagcagtgactggcgactttgcagtacatctctgctcacttgctgtcccttgggagtgagcaccgtctataacacatcgccatctacaaaagcctggtcacagtgttcaccagcacattcatgaaaatttaaatcaacattaaccaaagtacctgcaagtaacactgcttactcttgctgtttgcctcatctgactggaaaccttagcccccaaatatgaaatgccttctctagattaaaaggattcagagatgttgcactattgcactatatttctgcttcccgatctcgtttctgagtcctagtgaaatcgtaaacaagagatgaaataaacgtcgctccattttaataccgtctttagtatcatacacatgtgttcagtagtgagccacccaaagcctcctgccacaggagcagtagtcgaagcacagaggggaccccgctctgctgcctccccatgcagtccagtgatgaggtggatggagtcctccccacagtcacaccccaagcttcctcttctggtggaaataggcatcaaaccttgcttgggcgtagtcctaggagacagcaaagagaaggcctcagcaaggaatcctgctggcctgaaccctgcccatgtgtcccccaatccccaccccaggcaagagctgagggcacggacccatgagaccaaaagcacaggactggcctgtgcagcagggctgctcgggggcctcgctgctctacaggtgcaggctcctcaagctcccagcccaccccacacaccttcattctcaggaggcctggtttataggcatgggccagcccagccctgcctctcaggatgaacgtctcatccacatgcttagcactgctaccattcatcaccttgctaaccctgggtgctgtgggcactgactgaccgacataacacaccttttagagcaaaagacccctgggacacaggcgagtctagaacagaaggggagaagaggatgcccatcgcctatttcccgggatctcctgcagcatgacttttaagaaggacactgagaggcaagggagaaaacccggcttggtgttctgtttctgccactatttttctgggattgtgttgtgtgaggacaacacaatctcaaagacccactcctaatctaaaagtctgcaattctagaagccaggaagattacaattaacttttttgaaaaattaactgagctgtaatttctactctacaagcatgagcccattttaagtgtccagttgagggccttcacagatgcatccagccagttctccaccaccgcagtcaggagacctgtgtttccagcatccctacaagctcccatgggcctcttgcagttggccacaggcagccaccgactcaatatctgtcactatggactggacttttctttcctagagtagcacataaatgccactatacaatatgcagcctcgtgtctggcttctcactcagcgtgctgtctctgagtggcctgtgctgtcatgcactggtgccaccttccttttgcactgccgagtgttctcagtacacggatctggcactgtcgtatccacacacctgctgactggcatttaggctgcttccagtttgggacgattataaatgaaggtgcagaccgggcgaggtggctcacacctgtaatcccaacactttggaaggccaaggcagacggatcacttgaggtcaggagtttgagaccagactggtcaacacggcgaaaccccctctactaaaaataaaaaattagctgggtgcggtggcgggcgcctgtaatcccagctactcaagaggctgaggcaggagaattgcttgaacccgggaggcggaggttgcagtgagccaagatcgggccactgtactcctcctgcctgggcaacagagtgagactctgtctcaaaaacagacaaacaaatgaagctgctatgagtgtttgagtgcaagtcttggtgtggaatttgttttcatttgttctggaaaaattccccaggagggctgctgggtggtctaacccatcttcacactggctgtcgcgactgcattcccagcagcagcgcatgcgcattcccattgctccatgtgctcgccatttgggaccgtcagttctttcaagttttagccatcactgtgggtgtgtagggtatcgcaatgaggctttgattcacatttctttaatgactaattatacaaaacacatgaaaagattcttactggccatgtgtttctcttaagtgtccaaatcttccatccatttataaagcaggctgaggccgggcgcggtggctcatgcctgtaatcctagcactttgggaggccaaggcgggtggatcacctgaggtcaggagttcgagaccagcctgaccaacacaaagaaaccccgtctctacttaaaaaaaaaaaaaaattagccaggcatggtggtgggctcctgtaatcccagctacttgggaggctgaggcaggagagtcgtttgaacccagaaggcagaggttgtggtgagccgagatcgcaccattgaactccagcctgcgcaacaagagcgaaactccatctcaaaataataataatgaagcaggctgtttggtttctggctgagttatgagttctttatatatcctaaatatgagtcctttattaaatatacatttgtagtatttcctcccagtctgtggcttgccttttcattttctccatgatatcgttcagagttactcattttgataaagtccaactgtgatgacatatatgtgtgtttttgtccagggtccctggctcataactcccatagcccttactacagtaaacagaatctctctctctgaccttctgccgtcctttcacctgcccaaagctagactctaatctgactgtgggtcataagactcttattccagagggggtcctgcaccataccctgggataaggaatgctgtacagagaagcccgaagaacctggtcaggtcttgctaggtttagatcacaccttttttgtccaatcacatttcaacacggttgtccacatttcaatcatgcctatccaatgacatctccataaaatgcccaagaggacagggtttggggagtttctagagaactgaatgtggaggctgacaggaaggtgaacaagaatgagttccccaacccacccacagggacagaagctcctgtgctgggaatcctttcagacctcaccccacctatttatctcttcacccttaaaataccctttgttagctaggcatggtggcggaatgtctgtagtcccagctacttggaaggttgagacaagaggatcgcttgagcccagaagttggagaccagcctgggcaacacagtgagaccctgtcttaaaaaaaaaaaagtaatacactggtaaacttacgtgtttccctgagttctgtgagctgctctagcaaattaattgaacccgaggggaacgtgggaactccaatatatggctagttggtcagaaattccagaggcctggacttgcaactggtgttggaagtggggggcagtcttaaggtctcaaccctcaacctgtggggtctgactctgtccccacgtagacagtgtcgtaatggaattggagggca

SEQ ID NO: 94275 - DNA, 665590 bp, Homo sapiens
  misc_feature (1)...(665590): n = A,T,C or G
gcattgtcattgataacatcttatcaggagacagggtttgagggcagacaaccggtctgaccaaaatttattaggtgggaatttcctcatcctaataagcctgagagtgctacgggagaccggggcttaattcatcccttttctatgaccgtaaaagacagccgtccccaaagcggccatttcagaggcctccccttagggatgcatcctctttctcagggatgttccttgctgaaaaaagaattcagcaatatttctcctatttgcttttgaaagagagagatatggctctgttctgccaggctcagaggcagccagagtttaaggttatctcccttgtttcctgaacattgctgttatcctgttcttttttcaaggtgcccagatttcatattgttcaaacacacatgctctacaaacaatttgtgcagtttacgcaatcttcacagggtcctgaggggacatacaacctcctcagcttacaaaaatgatgggattcagagattaaagacaggtgtaggaaatcacaagggtattgattgygaaagtgataagcgttcatgaaatcttcacagtttatgatcagagattgcattaaagacaggcgtaaaaaattataaaagtattaatttggggaactaataaatgtccatgaaatcttcacaatttaggttcttctgccatggcttcagccggtccctccgttcagggtccctgacttcccgcaacatatcaaactaaagtgcttttgcacagcaaaggaaataacagagtgaaaagataacctgtggaatgggagaaaatatttgaaaatcatacatccaataaggggttaatatccaaaatatataaggagctcaaacaattcaatagcaagaaaacaaataatccaatttaaaagtgggcaaaaaacctaaatagacatttctcaaagggagacatacaaatggacagcaggtattaaaaaaaatgctcaacagcactaatcatctaggaaatgcaaattaaaatcacaatgagatttcacctcacacaacttaggatgtgtgttattaggatggctattttcaaaaaggtgaaagataacaagtgttgatgaggatgtggaagagagtaaaccctggtacgctcttggtgaaaatgtaaatttattacagccattatggaaaacggtatggagtttcctaaaaaatttaaaaatagaactaccttatgatccagcagtcttactactggtgtatatccaagggaaatgaaatccattatgtcaaagagatttatacaatctcacatttattgcagcattattccgatacccagggcatagattcaatgttaagttctatcaatgaatgaatggataaagaaaatgtgagctaggtatatataaatataaaatatgaatactattcagcctttaaaaagaagaaaatcctgtcatttgtgacaatacagattaacctgaaagacattatgttaagtgaaataaggcaggcacagaaagataaacactacatgacctcatttatatgcggaatctaaaaaaggtgaactcatagaagcagagagtagaatggtggttaccaggggctggaggtggtggttagggggagtagggatttggggtggtgttgactgaaggatacaaacatcatttttccgggaggaataaattcaataaatctattgtacaacatgatgactatagttaataaccacgtaacatatacttgaaaattgctaagagtagattttaagtgttctcaccacaaataaacaataatatgtaaagtaatgcatacgttaattagcttgatttagccattccacaatgtatacatatttcaaaacatcaagttgagcttcacatggtgacatatgcctgtagttccagctactgggaggctgaggtgggaggactgcttgagcccaggaattcgaggttgcagtgagctatgatggtgccactgcacttcagcctgggcaacagagcaagactccaagactccatctttataaaaagaatcatgttgtatgccataaatatatgtaatttttatttgtcaattaaataaaaatagtagtgataaaatgctaattaagtttgttgcttattaattacataaataaatgccacctgtgtttaacacaaactagacttacaagcccataaaattctttgcatatatgcacaaaaattattcaatgaatcattaaatatgtgagcaaaaatgacatttaagtgcccataaatgagaggcggttaattaaattacattccatccacaggataaactactatgctatcattaagagtcatccattcaccataaaaaagaataaagtactgatacatgctaaaacacggctaaacctccaaaatattctttctaagagaaagaatccagacacaaaaggtcacctattttatgattttctatctcaagtgttcaggataggtgaatccacagagataacaaagtagattagtggttgccaggggctagggcatgactgctcataggatggggtttcctttcagggtgtggaaagtgtcttcggatgagatagaggtgatgattgcacaatattgtgaaattactaaatgccatggaattgtgcactttaaaatgatgagttctatgttatagaaatctcacctcaatgtaagacatgtaatccattcatttcatttaacaaatacaaactgaggaccaacatattatgtgctaagcactggggttgatgcaaaaggagaaatgaaggacgtggttctatcctaaacaatctgacatggaaaagtctccaagtcataagtgaatgaaagcaaatctgtatgtggtcccactgggcctcattctctgttgagacaacgtcttattaacttaagatataatttggatcagggaaggttctcttctttgtgctcccatgggcctatgctatttttgtcctatctttttttttaagaaacagagtcttgctctgttgcccaggctggagtgcagtagtatgatcgtagctcactgcagccttaaactcccaggctcaagcaaccttcgtgccttggcccccacaagtagctggaattacagatatgagccaccatgcccagcctggtcttatgatttcctacagatgcatacaatttgcttattgtttgaataatcatgtctctttctcccataccgtaggctctgagaggaaatagccaggtttgtgtgacttctaattgtagcttcagcaccgttattagcacataatagatttttgataaatatttcttgaataaataacagaatgatttccttctgtacttctccaggttggccttttgagtctggggctaaaaacttggtagctttgactcttccccctttcacccacataataacaatcatgataataacagatgacccccatttattgagctgagagttttgccagccatggtgctgggtctctgtaagggtgagagatgataccgttgacctggtctcatgagcctggttttagaaccaaagatactgagactaagatcagaaaagtaacaacacaatgtccatgggaaggttggtgacacagcatctggatccagagttaaatccatccacaaggccttccagggaaaccagagtgtctaacatccaaacgactagctcttcctacagattccagggcaaacaccacattggccctctgtgtaaccaacgatcggcaaatcggcttagcagattgcttcaatttatcttttctgctgtcaagtagaaacagactaaagtcctctgtgatgtagattccatagcttctccctgagaatccttggaggtcctgaaataccattcccatctgccaggttttgtcgcttggcctgcaaagaccctcttaaaggcaggatccacacaatggccactcaaagcagaggtgagcctccaaaatccttctgccctcggtccttaaaggtaatttggtcttggaacaatatctaaggagctgaactcatcatagagaaaagaacactgcataggaagtgcattagtcagagttctctaaagaaacagaactaatagaatttatgcgtttgtgtatatacacacacacacacatatttctatagctatacaataaataaatatttatatataataaacaaattgtttataaaattataatttatacagttatatatttgtaaataaataatgcatatatttacatatttataaattgatccagtttatatgtttatagtttatgtatttataacttgtttatatacttatatatttataagataaatgaataatgtatatatttataaaataaatattatattatatttataaaataaatattatattatatttataaaataaataaataatggctgagcacagtggctcacacctgtaatcccatcactttgggaggcttgaggcagaaggatcacgaggccaagagattgagatcagcctggccaacacggtgaaaccccatctctactaaaaatacaaaaattagctgggcgtggtggcgcacacctgtagtcctagctactcaggaggctgaggcaggagaattgcttgaacctgagaggcggaggttgcagtgagctgagattgcaacactgcactccagcctggcaacagagcaagactctgtctcaaaaatatatatataaataaatgatgtatatatgtataaaataaatataaaatatgaattgacttatgcaataatggaggcttggtaggcaggggtgaggtggggatggttaatgggtacaaagaaatagaaagaacaaataagacctagtatttgctattacaacaggggtactgtagtcaataatcatttaattgcacattttaaaataatgaaaagagtctccttggattgcttgtaacacaaaggataaacacctgagggggatggataccccatttttcaccatgtgatgatgatgcattgcatgcctatatcgaagtatctcatgtaccccataaacatatacacctacgatgtacccacgataattaacaattaatttttctttaaataataaaggctaagtcccacgatctgctatctgcaagctggagaaccaggaaaacaggtggtgcagttcagtctgagttcaaaggcggatgtctcagctcaaggagaaagaaagacagaattggccttccctctgtttgctcttgttgggccctcagtggattgaatgatgcctactcatattggtgagacaggatgttcttgactcagcctactaatctcttccagaaacaccctcacagacacaccagaagtgagattttaccagccacctggacatcccttagcccaatcaagttgacacataaacttaaacatcagagggagtcaggtggctccctgggttctgcaaaagcaattaaccactccagaccttggtttcctttcttgtgaaattataaggttggaataaatgatctgtcaaatttactctttccaggccaggtgtggtggctcgtgcctgtaatcccagcattttgggagaccgaggtgagcagatcactgaggtcaggagttcaagaccagcctggccaacatggggaaaccccatctctactaaaaatggcacgggcctgtaatctcagctactcaggaggctgaggcacgagaatcacttgaatctgggaggcagagtgcagtaagccaagatcrcgccaatacactctggcctgggcgacagagagagactctgtttcataaattatatatatatataaatatatataaaatgtactctttccagagccatccctctgtgattctaactccactgcccagcgtgtcctgttgactgtgaccctgactatgccccctcatcccttttccatgtccatggtagatgagaggcctgtacatttccaacagcagtcatcacgctgttgcctgagccttgtgaattcttctgggcatgctgactttttgttctttactactgtcttttagaagaaaagatcccatcatttgatcagacagcctttgctatgctgacccaaaacctgctgcttggaaaatcacaggtaaaacctctgacagcatcactggtgtgagtcagtagggtattgttcaggcccagrttaatggggggagtgaaagttgagatttgctcgaatacacatattctcctgtagaataattactttgcaacccacacacttttggggacccagaattcatcttgaaccaaatccagtcttccttgtccttttctgtaagacagaggctccgtagtcaggaatggcagtgtgaaaagcaatggaagaacaaatgatgcagggaggcaggatggcttttgcatcacttgctggtcaaaggctttctttcccattgggatgtcaacatccacaagctgcgttgttttggactttgacacaagcccaaacaggagacctacccagcttccaagcaaggtggtttgagcagaaagacatcyctggggatgaaatgtgagtatttatcctgtacttggttctcccagccttttgggttatgcctgaggttcccgcctcatctctgttctaagttatgaataaagacttggtaaaatatataaggaactgaactcatcagagaggaaaaagccctgcctgaggagtccagggtcctgtctcttggttctgacgactgaccttgggaaagcaaggaggcactgcaggcctttgttttctgtcttgtaaaaatgataaggttgcgaccgggcatggtggctcacgcctgtaatcccagtactttgggaggctgaggcagtggtggatcatgaggtcaggagttcgagaccagcctgaccaaaatggtgaaaccctgtctctactaaaaatacaaaaagtagtcaggcgtggtggtgtgcgcctgtaatctcagctactcaggaggctgaggcaggagaatcacttgaacctgggaggtggaggttgcagtcagccgagattgcaccactacactccagcctgggcaacagagcaaggctctgtctcaaataaaaaaaaaaagataaggttgcaataactgttctgtagtgttcattctctccagggccaaccttctgtgattctacttctaacatcattgcccaaagcatcttgttgaccctgacccttcgtccctttacaactatgtccattgtagttgagagatctgtatatttgaagacatcaaagatataccactactgaagacataccactattgaagatgtaccatcttggtttcagtgatttagcacagtccaatccacaagtacagaaaataccagcccagtgaaatgacaaccatcatgctttctttactattcaagtaataatagatattaaccatctatttggacctagcttggcagtaggcactgtagggtattcctaagaagaatgtaagctgtggtgtgcacctgtagtcccagctacttgaaaagctgagggaggaggattgcttgagaccaggagttcaagaccagcctgggcaacacagttagactccatctctaaaagtaacaataaaagaagaagagtgtgacttggccactgcttacagagttgaaggttctcttgaaggtgttcaccccttataaaataaggagggtataactgggggttagtaagtggatgacacatgagaataaagtcagttcaaagaaaggaaaatgcctgtgggcagaaatgggaagaagtatttgggaattaaggatgcgctaaggctgggccacttcaagaatgggtagaatctcaataggcagaaagacctgcaggaagagagagggaaagagaagcctctagtcttgaagattctatgctgtctggagcagggattacatgttgaaagcaaggtaaagtaccatgcatgtggttataatctttccaatgtagcactttctcattaaagagctcttttatcagagttacctcatttaactgttataacatccctttgggttgaagttattatctctattttacagatgaagaaattgtgactcagaggagttragtaacttgccaacaggcacagagctgaaacattttagaagcagaaactcatagcttcagaatttaagtcattgttccttttactctacaatgctttgggagtcagtgtatagtgggtcttagttgataggccagctgtcagggagaaagatctgagactctagaytcacaaaggttatcatcatttaacatcgtgacctccatttcctcaagtggtccaaacagttgttaccyggttgccagatcagcatagatctgagtttctgagagacgctgtttgttgtcaggtagacagggcagagtccacctcaaaagtgaagggtgaattagccaggcatggtggtgcatgcctgtaatcccagctactcgggaggctaaggcacaagaatcacttgagcccaggaggcggaggctgcagtgagccgagatagcaccattgcactccagcctgggtgacagagtgagactctgtcaaaaaaaaaaaagaaagaaagaaagtgaagggtggggctggctaagaatttttaggtgggttagagcaatagtagagagggggataattcagttggaggaagttaacttatatagagcttgccacttcaaaactcttttcacatcttaaatattttattgagtgcctactatgtgacaggcactgagccaggtactagttcttcttctttcaaggtcactgtcagccattccaactatgtcctcatcagcatcttacaacacttgccctccgtgtccttcccgtgttctaaccttcaatcataaattcatccagcaaatatttgttgagcacctgtgctagggttagaggagacacacatgcacacacaaaagctatgcttccagcttttggtgcagggattttaaaaaattaaataatgtgatagaattaaaattgaaatatactctgaaagagacacgaagaaattttaatatctaaaatatctaatttatggcatttaaaaagcactggataatgctgagaaaattagtaaacagctcagaaagtcttagacttgaattcctacatgcacartaagaagatagattccaaatggatttgagagttcaatataaagaaggaagaaaaccattacaagaaactgtaagatcatgcttctctcctcttacattgacagagacctttctaagcacaaaagcaaaggaagaaagaatagtaaaatgccaatagatctaaccttacaatttttaaaaaagtacacacacacactgacacatactatatacaatattgacagatgtctttcaggacaatttgatgctgtgagttcgtgactgaatgaggctctttgctagaaactgaaggatgatggataaaacatcaaaaagaaaactgaaagatggatcgaggctcaagtacaagataaacatctcatctatcagatacagcaggagcccaagctgacaccagggctttctggagcctggatctggaatcagggttgggaagatagataaaccactgctctgtttgaaggcaggggctggagagagactgaacgtgctcgtgaaaggaggctggaaaacatgctgcaaaatcctgcctaagaaaaatatttttagattatatatctaataaagggactttcatctagaatatataaagaactcttacaactcaacaacaaaaacataatccaattaaaaatataatgagataccatctcacaccagtcagaatggctatgattaaaaagccaaaaaataacagatgctgggggaggttgtagagaaaaaggaacgtgtttatactgttgctgggagtgtaaattagttcaaccattgtggaagacagtgtggtgattccacaaagacctaaagacagaaataccatttgactcagcaatcccattactgggtatatgcccaaaggaatacaaatcattctgttataaagacacatgcagggccgggtgcggtggctcatgcctgtaatcccagcactttgggaggccraggcaggcggatcacgaggtcaggagattgagaccatcctggctaacatggtgaaaccccgtctctaccaaaaatacaaaaaattagccaggcatggtggcgggtgcctgtagtctcagctactcgggaggctgaggcaagagaatggcaagaacccgagaggcagagcttgcaatgagccgaaattgcgccactgcactccagcctgggtgacagagtgagactccatctcaaacaaacaaaaaaaagacacatgcaggcatgtgctcattgcagcactattcataatagcacagacatggaatcaacctaaatgcccatcaatgatagactggatgaagaaaatattgtacatatacaccatggaatactaygcagccataaaaaggaacaagatcatgtcctttgcagggacatggatggaactggaagccattatccttagcaaactaacacaggaacagaaaaccaaatactgcatgttctcacttataagtgggagctaaatgatgagaacacatggatgcatagagagaaacaacactcactggggcytatcagagagtggagagtgggacgagggagaggatcaggaaaaataactaatgggtactaggctaattatctgggtgatgcaataatctattcaacaaacctccatggaacaagtttacatatgtcacaaatctgcacatgtacccctgaattaaaatgaaagttaaaaaaagaaagccccacctgcaaaataggtaaaggatttgagtagacatttcttaaaacgagatatacaaatagccaatgaatgcataaaaaaggtgctccacatcattagtcattagggaagcacaaatcaaaaccacattgagataccatttcatacccactaagatarctataatttaaaaatagatggacaataacaagtgttggcaaggacgtggaaaaaatggaatccttatacgttgtctgtggaaatgtaaaatggtgaagctactgtaaaaaacaatttggcagttcctcaaaaagctcactatagaattgacatatgactaagtaattgcacttctaggcatatacccaagataactggaaacatgttcatatgcagacttgtacaaggtgggtcatagcaggtgctatggactgaattgtgtatccccaaaattcatgtggaagctttaacttctagtgtgatagcatttagagaacagaggtactgtaattaggtttagatgagaccttaggagtggagcccatgtratgggattagtgccctgataagaagagacgccagagagcttgttctctctctcttccccatgggaggacacaggcagaaggcagctacctgcaaggcaagtctacggtattttgttatggtagcccaagctgattaattcaacaggattgatcctaatagtcaaaagtggaaatgatccaaatgcccaccaattgatgagtagatagagaaaatgtgatctatacatacaacagattaatattcagccataaaaaccggaatgaattactgatgcatgctacatcatggagggaccttgaaaacattgtgctaaatcaaagaagccagaaacaaaaggctaactaggatgtgattccatttatacgaaatgtccaaaatagcaaatccatagagacagaaagtagattaggcgttgccaggggttgagagtaggaggggatgaggtatgactgctgatgggtacagagtttctttctgggttgataaaaatgttctggaattagatagtgrtgatgattactcaattttgtgattatactaaaaactgctgaatgaaacatttatgagtattgattttatggtatgtgaattatcttaataaagccacccagagttttaaaaatcactatcaaaaaagccttctcttgtctttgagactgctgagtcttattcttaggtctgtagctttccaattttctctttcattgtttgctaatctttggaagaactattagagtggtgcaaaggtaactgcggtttatgccattgaaagtaatggcagaaactgcaattacttttgtaccaacctaatagtatcctctgtattggttctgattctttggatgacagaaggagtctatctagagcttgaccaatgccagaggtttggtctttaagaaattctttaaaaaatcctacttagccagcctggccaacatagtgaaaccccatctctactaaaaatacaaaacaatattagccaggcatggtggtgtgtgcctgtagttccagttactcaggaggttgaggcatgagaatagcttgaactcargaggcggaagttgcagtgagctgagattgcgccactgcacttcccatctgggcagcagagcaagactctgtctcaaaaagaaaaaaaaaaaaattctatctagccctatacctcctggcaagctgcaagcctaaggtaaaaggasagcacagacttgacctccrgactaggagcctcatgaagccttgaactggctctgtgattgttgatatgacggtctccatatcaacgcaaggcatggttttgcattgaggttatggagcagcagatgggggcaaccgcagaccaccagacagaagggaataaataaataagaactaaacaaaaacaaaactcatagaaaattagcctataaatcaaaatatcaaaatgcaagaaaaagccatctaatggaagacaatcgattctggaagacaatcgattctatcaattttcagaacagaatataaattcactcttgcagcattgaatgtatacaacagctggacaaatactttaaaatttatattattaggatgctcaaatagaaaaatgaagatatgttttcaatttggaaaaacaagacattacaaaaatttaaaaagcagagctaataaaacaggtaaatacaaaaacaaatacaattaaagtagcacaatttcagaaaagaaaaatcatggtcactggaaattatacaaaatggaaacaaaaggaggattacttaattaaaagatagaattgagaaattcacacaaaatgcatcatggagaggcaaagatgtgtaaaacaggaaagagcagttagaagacatggaagacttgagatctttcaacattcagccagtaggaattctagaagccccagaacaaaagaatagtgggagttatggaaaatctatttttggaaaaaaaaaaaagtaattaataggcattttctagaattgaattaaaaatgatcttcagtttggaaatccaagtattcaacagggtgaagctgsatagaaatctcaggaacatagccttgggtatayggaaactccacataggaaataacatgataaattaatggaaaaagaatgactgtagagaaatatggamagtatgttcttactacatattgtaaataaaatgaattttaaatgaactaaaatgcacatttcaaaggcaaaacttcaaaatgtttagaagaaaattttgaataatatatcatctcttggtagggagtatttctttaaaaggaggcacaaaatataaagcaaaagattgacaaactgtactacattaatgtataaagcatcttcataataaaaatagaagaaagttaaaagacaagtcacacactgagaaaaggtatttacaatgtacgagaaaattatttacagaacatttaaggagcttaaaaagacaactcaaaagaaaaatagacgaatagtatgaacaggcagtttacagaagaggaaagctatctgaaaggaaaataaatcttgraaccccaaactcattaagtggaagggaaatgtcaagctgggaactgagtcacacaaacctgccaccttttttgcttcctaaataagatggctacaaggtgaaaagctacatacctccctcatattttgcctacaagtaaattcctagtgtgctccaagatccttgacctaaagtgtttctgttaaaattcaccataaatgatagcttatctttacatatgcattcacctctctgcccacctgacacaagtgcatatctgattgttgccttgcccccatttgtctgttattttatgcaaaagagcagagtccctgcatttttgcatgccctatttgtgtatgttatcttatgtaaaaatgcagattcactgagccagacaaaggcatggatgactattccccccacctccctctcacattaaaattgtgtgtttctcaatatcctgccctttcccctttaaatttggaggcctcaaaatcaactttggagaaaggcgtaaacctgtcttccaggcacacgtccttaactttggcaaataaacctcctagaatgatttagatttgtcttggtcatttttcttgattgacatctgaatgattggtaaatatataaaagaatttccaacctcacaaataatcacagaaatacaacttaaaacaacaatgaacaccaattcacagccatcggattggcaaaaattaaagtttgacaataaagagtataggtgagagtatggagaaacagaaattctattacactgttagtgggagtgcaaattgatgtaacagctttggaggccaatttgattacatctggtaaagcagaagattctctttaagagacagggtcttgctctgtcacccaggctggagtgcagcagtgaaaccatagctcactgtagcctcaacttcctgggctcaaatgatcctctggcctcagcctcctgggtagctgggactacaggcatgtgacacccttgcccagctaatctttttattttttgaagaaatggggtctggctatgttgtccatgcttgtctcaaactcctggcctcaagcaattctcccacctcagcctcccaaagccctgggattacaggcataagccactggatccaccatgcagtagatttttatactctaccactaaggaaatatagtctcacacagggataaaggagacatgtttataaatactcactgcaaaatggtttgttatagaggaaaaaggaaaccatatgagcattcattcattcatgagaaaatggacaatttgtggcatgttaatatagcaaaatgtactgcagctaaaacaaatgaactacagctacatagaggaacactgagaaatgctgaaaaaattttgaaatgaaaagagcagtgtatgcaagttatatgaggggtctttmaaagttcataaaaaatgcatattatgaaaaaatctatgcatggatttcaaaaatttttataccaaaataaacttgtgccaatttgttgtaacatgtctgaacaggctctagtttcaagcactaagaaggataagatattggtttgaattaagctcctatcagagcatcatgtattctattaaaattgaagcaagaacaaaaataacatttatcatgaagcttgagaggaagaatggtaaaaagcattgatcctttatggaaaatttatggagacagtgccccaaagaaatcagcagtttacaaatggataactcattttaaaaagggacaagataggccgggcgttgtggctcatgcctgtaatcccagcactttgrgaggccsaggcaggcagatcatgaggtcaggagatcgagaccatcctggctaaaatacaaaaaattagccaggcttggtggcgggtgcctgtagtcccagctactcgggaggctgaggcaggagaatagcgtgacaccgggaggtggagcttgcagtgagctgagatcgcgccactgcactccagcctgggcgacagagcaagactctgtctcaaaaaaaaaagaaaaaaaaaaaagaaaggaccagataatgttgaagatgaagcctgcagtgacagaacatccacatcaatttgtaaggaaaaaattaatcttgttcatgccctaattgaaaaagactgacaatcaacagcacaaacaatagccaacaccatagaaatctcaattgcttctgaatacacaaatgtgatcaaaacattaaagttaagcaaactttccacttgatgggtgccaaaacagttgctgccagatcagctgtagacaagaacatagcttttgttggaaattttaaacacatgggatcaagattctgaagcacttatttgaagacttgtaacaggagatgaaacatgacttttccagtacaatcctgaatacaaaacacaatcaaagcaatggctaccaagaggtggaagttgtccagccaacacaaaagcagaccagtcaagagtaaaggtcatggcaacagtttttgggatgctcaaggcattttgctttgtctttctggagggataaagaatgataacatctgcttattaggaaagtgttttcagaagttttgccaaagctttagcagaaagatgcctacgaaagcttcgccagagagtccctctctaccctgacaatactcctgtccattcctctcatcaaacaggggcaattttttgagtttcagtgggaaatccttaactatccaccttacagtcctgattcagctccttctgatatattttagtttcctaatcttaaaaaatctttaaagagcacccatttttttccttcaactaataatgttaaaaagacggcaataacatggttaaattcccaggaccctcactcaattctttagggatggagtaagttgctatcatcacttacagaagtgtcttgaagctgatgaaacttacgatgaaatgtagtttgtatttttttgcgtttattactattttattttattttatcttattttgagtcaagagtcttctctgtcacctggaatggagtgcagtggcaagaacatagctcactgcagcctcaaactcctgggctcaagtgattcttccaccttagcctccccagtagctgggagtacaggtgyatgccaccgcacctggcttatttatttatttgtttttgagatggagttttactcttgttgcccaggctggaatgcaatggcatgatctcagctcactgcaacctcttcttcctgggtttaatcaattctcctgcctcagcctccagtgtagctgggattacaggcatgtgccaccacacccarctaattttgtatttttactagagacgaggtttctccatgttggtcaggctggtctcaaactcccgacctcaggtgatccacccacctcggcctcccaaagtgctgggattacaggcatgagccaccacgcctggctaatttatttattttttatagagatgggatctccctatgttgccctaggctggtcttaaactcctggcctcaagtgatcttcctacttggcctgctaaagtgttgggcttacatttttatcttttaattcattttccacaagctttttgaagtcctcttgtatgtgcagagggatgtatgccaaatacacattgtatatgtattatataagyttaaatcatggagaacagtatcatkgaaagtctgtagaaatctaaatttgtagcaaatatctagaaataatataacaaacttatgatagtggttagctaactggagcagtaggaaagagcttgggattggaaaagggacatggcgaccccacattaatctgtgaaatttaacttwaaaagtgtttgaactaaatacagactaatgttaagattttataaagcaaagtaatggtgtttattttattatttaaaaatttttrttatatattttagatgttttattatgaacatattaaaaatccaaaacaccccagtactaacagacaaaatataaattgggaaaggttgaaacatatgtcaggcatggttgaggttcttatcatataatctgctcttatttagcaatgcaaatgagacgagtacctgggagaaaagttggacaacagcattaacaggcaaggtacaagaggaaaatacaaatgaccagtgaacttaagaaaggaagttccgtatcagtgcaaaaatgcagatcgaagcagcaataaaatactatcttttaatctaccaaattttaggaatttgcctgtagaaagagattctctgctacagattctcacaaaactttattttcagagatattcttcgtagtgaattacagtggtgaaaaaatacactacactaaggtgtgtccctctgtccaagccatcagttctctttcctaaattccatgtcacacatttttatcttcactgtatcttgtctttttttttttttttttttttgagacagggtctcactccattgccgtggctggagtgcaatggcgcaatcacagcttactgcagttttgactgcctgggctcaagtgattacctcactccagcctcccaagctggaaccacagacatgcaccaccacatccagctaattttttaaattactattttagagacagggtcctgcactattgcccaggctggagtgcaatggtatartcacagcttactgcagcctcaactacctgagctcaagtgattcccccaagtcagcctctcaagtacctgggaccacagacatgtgccaccacactcagctaattatttttattattattttagagacagggtctcacactgttgcccaggctggagtgcaatggtgcaatgatggcttactgcagcctcgactgcctgagctcaagcgattcccccacctcagcctcccaagtaactgcaccacagtcatgtgccaccggrtccagttaattttttaaattattatttgtagcaactagatggtgttactatgttccctaggctgatatcttcacattttaacatctgtgaaattgaggtgtgtcttacaatcactgtcagggggcagtcatgatgaggcttgttgtctatacatgcttatcataactcacaaaataagtgtgtgcctctttccaagcaaccagaagcacacacttcttctccaatgcttcctaagggctctataaactgtacctgtacaagcaggcttggaaatgtacattcatctcaaagcaccatcctacttcaagctagagcaacttaacatgaaccaaagcaggttaagtgaaaacaatgtcaagaatcacacattcataacaaaagtaacttcttaaggtgacagggctaaatgaaactaagcagaatttgtgaaagcaagcaggaaaggacacttttaatttaaatgaaacgtgagttagagcaagtttagacaaaactaagcaatttatgtcaaacaaactccgaattgatcattctttttaaaattaatttcttacaaggcattcaagaaaatctagttaatactaagcagtttacatgacaccaaactcaaaatcacttgttcctttccaagaaaacttcttattgcccattggagctaacaaatatatgtaactcaacaatttatatgaraccaagcgcagactcaaaacttctcaaaatgcatttcttacaatgagttagagtgtatgtagttgaaactaatcaatatatgtgaaatctagttcaatatcactcactcatttcaaacaaaactcataaacctcataaactttatatgtgtaaacaagactagagaggtattccttgccccgttatcaaggagtcattggattttacagtgatcctttattccccaaaccctttaaaattagatttgtgttgctttggttgaaagagatcatcttagcatctctttggggaaagcattttaggaggatttgtggctactctaaagctgtagtccccatctttttctgcaccagggactggtttcacgggagacagtttttccacggaccagggatgagggatggttttgggatgattcgagcacatttcatttattgtgcactttattattattagattgtaatatataatgaaataattctacaactcaccatcatgtagaattagtgggagacctgagcttgttttcttgcaactagatggtcccacctgggggtgatggaagatagcgacaggtcatcaggcattagactctcataaggagcacgcagtctagatccctcgcatgcacagctcacgacagagttcttgctcctgtgagtatctgatgctgtggctgatctgacaggaggcagagctcaggcagtaatttcagctgttggaggtggctgtaaatgcagatgaagctttgcttactctgctgacttcctgctttgtgccgggttcctcacacctaaaggctgagagcagtactggcctgggggctagggacccytgctgtaaaggaacgtacaaacagtgatgggggatgaagagttattatcctcatcgtgcaggagcctatgaaaatagataagaaactctctaagtatgcaaaagatgaatgggtcaagaacagagggctggctgaaaaggaaaacaaccagggaagaaatatttgaagcatatgtaacttctccgcaagtcagagaaatgtagactgggaaaataagttgattttttttgcctatcaaattatgcaagatttaaaagctaaactatccatgatgctcaggttacagtaaaacaggaactattatgttctcttcataggagtgttaattgaagcagcctttctggagagtaatttgtcagtatgtaaaaagagcttttaaaatacccatacgttgctcatttatgcaaaaaaaaatacaggaaggataaatcaaactaaacaaattgtttagagaaggatgggcataagaaagaagaagaggtatgaaataggaacagagagacattttgttgggagaaaagctgagtgttgggaaagaagctgaggcagggcttgcatgtctgctagacttgctggctccttgcttcttccactcccattatctcaagcagccatatgtttctcattcacttgatacaccatttcctttcaacccccacatcctcaccacctgtttctttgtttaagcaccaataaatagcgtgggctcccagagctcagggcctttgcagcctccacactcgcgatggccccctggtcccactttctctcttactgtctttttctcatgcctttgactccactggacttagtcgcccccacgacctggtgttgggcctgatcaccccaacaacatttctcctgtatatatacctttgacatggttcaatggactagaaacatagtaatgttttccatacctctaaaataattgaaaaattaaaatcaaccgtgatggggcacaggagtggggtcaccaaaaatagaagacaaactgggcaaactggttcacacctgtaatcccagtgcaacatggtgagagctgtctcttaaaaataaaatgcagatagcaacatatgaacctaactgtgttataaatgattagccacactaaagagagtgagggagtgtgggaggaaagaactaattttagaaactttggaaaataggatttgtttattttttagagttggggggcggggtcttgctatgttgccctggctggactcaaactcttggcctcaagtgatygtcccacttcagcctcctaagtaggaaagtatgatttttaactggacactacaagactgaaaacaaaaagaactatacacaaatactgtactcaagctagtaaatgtgtttcttagagaggtatgagttaacaattctgaaactatgggtttacttggattgaatagatgaataaatatattgtagatgacatcttcagggtttctcactgtcagataaataaattacaggctgggcacagtgcctcatgcctgtaatcccagcactttgggaggctgagggaggcagatcacctgaggtcaggagttagagaccaacctggccaacatggcaaaaccttgtctctactaaaatacaaaaaatgaaactggcatggtggtgggtgcctgtaatcycagctacctgggagtctgagataggagaattgcttgaacctgggaggcggaggttgtagtgagccaagattgcaccactgcacttcagcctgggcaacacagcaagactctgtctcaaaaaataagtaaataaataaaaataaataaataaattacaaataaggaaagagggaaggctagaattaaccctgtggctttggattgtcataggaagtatcaatatgaactcacagttttaaatatatatgcagagagggcacaaatataatggtgttcacaaatgtggatcagaacacatacatatattttctagctatgtccactatgaaggcttagaattaatgacaccctagtagcaatgaggacatttagtacacagatctttgtttctaaataccattcccaatcaaagaaaccaggactacttggagaagcggatgattccagagctgggggagggaaaaatctaagctaaacccggatcatcttgtgttgtcagaaattaagtgctcaagaaagaatgggagcaggtgagaaaaacacaggagcccccactataggagatcccactggccaaagctagaccaaacttagcagcaaaagaaataactatattattggattgaaatccacagwgtgaaaaacgaaaacaaaacaaaaaaagagaagaaaattcagaagtttgtattgatgcagatacaatcatttgctgcataatgacatcttggtcaacaacagaccacatatacgacagtggttccataggattataatagtgtttaaaaattcctattgcctggtgatatcatagcactagtaacatcgtagcgcaatgcatcacctttttaatgcttagatatgtttaaataaacaaataccattgtgttacaattgcctacagtattcagtacaatgacatgctgtacaggcttgtagcctaggcacaataggctataccatatagcctaggtgtatagtagtctagaccatctagatttgtgtaagtacactctgtgatgttcacaccacaatgaaattgcctaaagatgcatttctcagaatgtgtcaccatgattaagtgatatatgactgtaaataattgaatgaattaatttataggagcaaagagatagctctttacagaataattccagttaataaatgyaaaaagatgaaagaaatagaaaaccgccattaggcaaacaccacagtaataattgctgtaggcaagttccatcaatagatgctaaaattagtagtcaaaaacttgaaatctcttgcatttcgatacactaacaatgcacaatctgaaaagaaattaagaaaacaattccatttacaatagcaccaaaaagaataaaatacctagaaataaacctmaccaagaagatgaaagacttatacactgaaaattacaaacattgctgagagaaactaaagaagacacaaataaatgaaaagacatcttatgctcatggattggaagacttactattaaactccccaaactaaccaaaccaaactaccaatttgatccaattcctatcaaaatcccagtggcagtttttgcagaaataaaacaaataatcttaacattccaatggaatktcaggggatcccgaatacccaaaataattttggaaaagaggaacaaatttggaggaatcacacttcctggttttcaaacatattacaaaattacagtaatcaaaacagtgtgatactggcatgcagacagacatatagaacgatggaatagaaagaccagaaataaacccttcatgtktgaggggaacatcacacactggggcctgtcatggggtgggtggagaggggaggaacagcattaggagatatacctaatgtaaatgacgagttaatgggtgcagcacaccaacatggcgcatgtatacatatgtaacaaacctgcacgttgtgcacatgtactctaggacttaaagtatataaaawaaaaagaaataaacccttcatgtgtggtcaaatgatctatgacaaggccattaagaccattcaatggggaaaggttactcttctcaacaaatgatgtgagaaaaactgaacatatacatgaaaaataatgaaattggacccttatcttaacaatacacaaaaattaaaaatggattaaagacctaaatgtaagatctaaaactataaaactagaagraaacaaaggggaaaaacttcacgacattggacttggcaatgaattattggatatgtcactagaagtgcaggcaactatagcaaaaataatcataggaggctacattaaatgtagaaacctttgtgcatcaaagaacataatcagcagagtgtaaagataacctatggcataggaaaaaatattttcaaatcacaaatctggtaggatgttaatgcctagaatatgaaaataactcctacaacttaaaaacaacaaaaaatcaaataaccaggccaggcatggtggctcatgcttgtaattccagcactttgggaggccgaggtgggtggatcacttgagttcaggagttcaagaccagcctgggaaagatagtgaaaccccatctctaccaaaactataaaaaattagccaggcatggtggcaggcacctgtagtcccagcgacttgggaggccaagataaggggatcacttgagctcaggaggcaaaggttgcagtgaacgaagattgcgccagggcactccagcctgagtgacwgagtgcgaccccatctaaaaaacaaaacaaagcaaacaaccaaccaaataacccaattttaaaatgggcaaaggacttgcataggcatttctccaaagattgagaggtgacagcctgctggcagccctcgcagcccttgctcgttctggctcgctctcggtgcctcctccgcctgggcgcccattctggctgcgcttgaggagcccttcaggctgcctctgcactgtgggagcccctttctgggctggccgaggtggaagccggctccctcagcttgcggggaggtgtggagggagaggcgcaggcgggaatcagggctgcgcggcggcactcgcragccagtgcagttccggrtgggcatgggcttggccgccccacactgggagcagcaggccggcgtcaccagccccgggcagtgaggggcttagcacccggggcagcagctgtggagggtgtgccaggtcccccagcagtgccggcccaccagcgctgggctccaatcttcgcccggcctcagctgcctccgcggggcagggatcgggacctgcagcctgccatgcccgagcctccccccgcgccagtgggctcctgcgtcacccaagcctccctgacaagcgctgccctctgctcccccgcgcctggtcccatggaccatccaaaggctaaggagtgcaggcacatggcctgggaccggcaggcagctccacctgcagccccggtgtgggatccactgggtgaagccagctgggctcttgagtctagtggggactgggagaatctttatgtctggttaaaggattgtaaacgcaccaatcggcaccctgtcaaaacagaccaatcagctttctgtaaaatgggccaatcagcaggatgtgggtggggccagacmagggaataaaagcaggctgccgagccagcagcggcaacccgctggggtcaccttctactctgtggaaggtatgttctttctgtctttgcggtagctttcgttgctgcccactcttcgggtccgaactgcctttatgagctaaaatactcaccgcgaaggtctgcagcttcactcctgagccagcgagaccacgaacccaccagaaggaagaaactccgaacatatccgaacatcagaaagaacaaactccagacacgcagcctgtaagaactgtaacactcaccgggagggttcacagcttcgttcttgaagtcagtgagaccaagaacccaccaattccggacacaagatgatatacaaatgaccaacaagcatatcaaaatatgctcagcatcagtaatcaccagagaagcgcaaatctaaaacaaagtgagatatcactactctgacccattgcaattgctgctagtaaaacaaaacaaaacagaaaaccaaaaaaaacagaagtgttggcaaggaagtggagaaatcgacacccttgcacacttttggtggaattataaactggtacaaatgctgtggaaaacaatgtgttttttttttttttttttgagacggagtctcactgtcgcccaggctgcagtgcaatggtgcaatcttggcacactgcaacctctgcctcttgggttcaagcgattctccttcctcagcctcctgagtagctgggactacaggtgcacgacaccatgcctgactaatttttgtatttttagtagagatgaggtttcaccatgttggccaggatgtatctcctgacctcgtgatccacccaccttggcctcccaaagtgttgggattacaagtatgagctactaagtccggctggtgttttcttaaaaaaaattgaaatagaagtaccatatgattcagcaatttcacttctggatatatatccaaaagaattgaaaccagggcctcaaagcggtatttgtacactcatgtttatagcagtactattcgctatagtcaagaggcggaggcaacccaagtgtcatcagtggataaatgtgatatatacaaagaaaatgtggtatatacacacaatggaatggtgttcagccttacaaaagaaggaaatcctgtcacatgctactacatgggtgaactttaccgacatgatactaagtgaaacaagccagtcacacaaagacacgtactgtatttcacatattcgagaaacctatagcagtcaaattcatacaaacagaaagtagaatggcatttaccaggggcttggaagagggrgaaagggaaaaagggtgatgtttaatgggtatagagtttcagattccatgaataaataaataaaaatttgagaagaaacaggatatttgcatagttccaaagaatcatgactcattcaaggttgggcgcggtggcttacgcctgtaatcccagcactttgagaggctaaggcggcggatcatgaggtcaggagatggagaccctcctggctaacatggtgaaaccccatctctactaaaaatacaaaaaattaggaggcgggcgtgttgccgggcgcctgtagtccctgctactcgggaggctgaggcaggagaatgatgtgaacccgggaggcagagcttgcggtgagctgagatcacgccactgcactccagcctgggcgacagaacgagactctgtctcaaaaaaaaaaaaaaaaatcatgactcattcaaatgcatattaattacaaagagaaaaatcataactttacagtggagaagtctggcagatatcagacatcactttaaccaagtgatcaaggctaacgtcaccagcataagacatatcaacctaggaacaccttcatatcatgcgccgagaagggcacaatgtcacttctgagattttctcacccaacatgcataacttcaattgaatctaagaaaccatcagaggaacccacatttggggacatgctccaaaatacctgaccagtactcaaggtcacgaaaagatagactgaggaactgtcacagatgggaggaaatacaataaatgataatgaaatacaacatgtgaccctggattgaatcctagaccaaaaggaagacattagtgaaaatatggtgaaatttgaatagagtaggctgggtgcggtggctcacgcctgtaatcccagcactttgggaggctgaggtgggaggatcacgaggtcaggagttcgagacagcctggccaatatggtraaaccccrtctctactaaaaatacaaaaattagcccagtgtggtagcacgcacctgtagtccagctactctggmggctgaggctggagaattgcttgaacctgggaggtggaggttgcagtgagctgagatggcactactgcactccagcctgggcaacagagcaacactcttgtctcggaaaatwaataaataaataaataaataaataaaggagtagagtttatagtttagttaatagtgttctaccacttcctaaatkttggtaattgtcctatgattatataagacattattaacattagaagaagctagatgaaaggtttgtaggaaatctgtactatttttgtaacttttctgtaaacctaaaattattttaaattacaatttttttttttttttttggagacggaattttgcttgcaacctccacctccccggttcaagtgattctcctgcttcagcttccccagtagctgggactacaggcacccgccaccatgcccagctaatttttatatttttagtacagacggggtttcaccatgttgaccagaatggtctcgatctcttgaccttgtgatccgcccacctgggtctcctaaagtgctgggattacaggcatgagccaccacgctcggcccaaattacaatttttaaaactctatacacattccgccccsgccctgccaggagtttctttttcagaaatcttttctaaaggaacagtctaaaatataaaagtgtttatataaaaagatttatcatagcattatccataataattaatacatcagaaaaaagagctataatatgctcatgaataggatgacagctagtaaattattatcttttctgagttcttggattttttgttgtttgagactgagtctcgctctgtcacccacgctggagtgtagtggcgccatctcggctcactgcagccttcacctcccaggtttaagcaattctcctgccttggtctcccaagtagctgggactacaggcatgcatcaccacatccagctatttttttgtgtgtgtgtgtgtgtgtgtgtgtgtgtgtgtgtgtgtgtgtgtgtgtttgtatttttagtagaaacagggtttcgccatgttgaccaggctggtctggaactccaggcctcaagtgatccacccgccttggcctcccaaagtgctagcattacagggtgagccactgaacctggccggctcttggatttaaatacaacctctacactgacaacttccgaatgtacgtccctcctcttatagctggctggctgctggctccacacctgtaccyggaagaaagactgaggggtgcatcaaagtggtatctctaaaagagcttcggattccttccccycatcccaacttcagacttctctgttgcttaagtgaaatttttgaagtcatcctcattcctctgatttccttgccttctgaacttgctctgtaagcaagtcccttagttttccctccaagacacattgctgggccatttccttctctccagcatcattccttcttcctgctacaagccaccatcatctctcctggaccactgcaaagcctcccaactggtctaccagtttccttggttactcttcttcaccattctccacacggccttctgaatgatgttaaatacatacacagaccaggcaaggtggctcatgcctataatcccagcacattgggaagccaaggcaagaggatcacttgaggcctgggcaatgcagcgagaacccatctctccaaaaactttaaaacttagccaggtgtggtgacacacacctgtagtcccagctattcaggaggctgaccaagaggattgcttgagtccaggagacagaggctgcagtgagctatgatcatgctactgcattttagcctgggcaacagagcaagaccctgcctcaaaaaaaaaaaaaaaagacctacaccaacataccccaacctgttcctcctctacccaaattgtcccccattgctcttaaagtccaatttccttaccgtctcctactgggtcctctggcagctggccaagctgtcagttgggacccaccctccacctctcccctcctctctcctgtgttctgaacacagtagtctgcactcagtttcctgaacagacaaattcttttcttcctaagggtgtttgctcttccatttgcacagaaggttctgtgctcagatcttccatggctgtttccttcttgtcctcaggacccaactaccacctccttagtgagacctgccttgaccactcaacataaagcagtctcatccccacctaccggacattttctatgtcaacatgactttgaaaaatgtttgagcactagtaatatgcaataagcaaaaatgattttgttcactcatttgttcaatggttaacattgtgcctcccttctgtaaaatgtaatcttcatgagaatggcttttaaaaataatttaattttattttagatataaggtctctttctgttgtccaggctggagttcagtggtgcagtcacagctcactgcagcctcagcctcctggagccaggtgatcctcctgtctcagcctctcatagtgctgggattgcaggtgcgagccaatgcaccaagccaagaatagctttttaaattgtgaatttaaaaacttttcagaactaaagagaagttgaaagactagtacatgaacttcacctagtttaatctaatgttaacattataacacattatctttttctctttatacacacataaacacatgtgcacacacacacatacatgcatacatacgtacttttgtccttacctatttgaaatgagttgcagacattgtggcattttacccacaaatacctcctcatgtatttcttaagagtaatgacatttctctacataatattgtcacaattaagaaaattaacacttccataaattcatctaacatacagtacaaatttctctgtcttaaaaatgtctttgatgccagttttatttgtctccctgattcaggatcttatcaagtatcacacatcgcatttggttgtgaagtctctctagtcttttactcaccttgcctcttaacttttcatggcactgacttttttgttcttttttttgaaaagcccaggttattcaaaaagcccaaagacctcatctgtcttctttcgttctcccttcccttcccttttcctttcccttcccttcccttcccttcccttcccttccgtcccccaccctcccctcccctcctcctcccctcccctcccttttttcctttctccttccttccctccctccctccctccctctctctttctctctctctttctttcttacagggtcttgctctgtcacccaggctggagtgcagtggcatgaactgcaacctcaacctcaacctcccaggctcaagtgatcttctcaccatggacttctgaatagctggggctacaggtgtgcaccaccatgcctgtctaatttctttatttttattttattttattttactttttgagatggagtctcactctgtcgcccaggctggagtgcagtggcatgatcccagctcactgcaagctctgcctcccaggttcacgccattctcctgcctcagcctcctgagtagctgggattacaggcgcccgccaccacrcctggctaatttttttgtatttttagtagagacggggtttcaccgtattagccaggatggtctcgatctcctgacctcatgatctgcccacctcggcctcccaaagtgctgggattacaggcatgagccactgtgcctgacctctttattttttttttttaatagagatggggtctcgctatgttgcctaggctggtctcaaacccctatccttaagcaatcctcccgcctggcgtcccaaggtactgagattgtagaagtgagccaccatgtctgacccatctgtcttatagaacacattacattctgaatttgcctgatgacttacttgttatattgattaattatgccttcagtgtttcctgtctctttccagtcagaggctcactccagagctgcactgtccaaccaggtggccaccagccacatgtggctgctgagcacttgaaatatggctggtgtggccaggcacggtggctcacacctgtaatcccagcattttgggaggccgaggagggtggatcacctgaagtcaggagttcaagaccagcctggccaacatggtgaaaccccgtctctactaaaaacacaaaaattaggtgggcatggtggcaggcgcctgtaatcccagctatttgggagactgaggcaggagaatcgcttgaacccaggaggcggaggttgcagtgagccgagatggtatcgttgcactccagcctgggcaacaagagtgaaacgccatctcaaaaaataaagaaaaagaaagaaatatgactgktgcaactgmggaacagaatttttacttttctttagtttatattaatttacatttaaatttttaaaaatgatgcttttcagttttggaaactgaatatgtttggaataacttgagtgtgtgaatctactttttaaactgtatattatgaaatctgtctggttagagatctgctataagtgtaaaatacaaactagattttgaagacttagacttaaaaaaaaaaatccatccattgcatccatctgtccattcacaaaaatctaaatttaatcatcttcttctttttttttttttttttgatagggtcttgctctggtgtccaggctggagtgcagcagtgtaatcatagctcactgcaacctcaaactcctgggctcaaacaatcctcccatctcagtctcccaagtagctgggactacaggtgttcaccaccacgcctggctaatttttaatgtttttgggtaaagacaagttctaacgatgtttcccaggcttgtctcaaaccccggggctcaatggattgtcccacctcggcctcccaaagtactaggattacaggtgtgagccactgtcaggccaaagccatttttttttttaagtaacaacatacactcacaatgtgaaaatccgagaggagtagcaagtctagggaatgctgcaaatgactcgccaggttgccaattctccaaggtgggaatcacatatctcttgattaccaatgtatctcagcacctacctagcacctgacacagagtggatgcttaatccatgtttgttgagtgaatgagagtcagtgagtgagtaaatgatgaaatggtcaatcctttggccagggagctgaggggtcttctccagcagaccagcaagcatcatcaggccaagtgtgctttaatattaaaaagaggaatataggccaggcgcagtggctcacgcctgtaatcccagtgaagtggctatgttgtctggggtaaatacctggggttcatcatctatctcatgccaggaaaatttaggacacactaggagtttaggagcggaggtttaataggcaaaagaaagagaaaggaagacaagggaaggccgggtgtggtggctcacacctgtaatcccagcactttgggaggccgaggcaggcggatcacgaggtcaggagttagagaccagactgaccaacatggtgaaaccccatctttactaaaaatacaaaaattagccaggcattgtggcacgcctgtaatcccagctactcaggagactgagtcaggagaattgcttgaaccttggaggcggaggttgcactgagccaagatcgtgccattgcactccagcgtgggtgacagaggagactctgtctcaaaaaaaaagaaaaaaaagaaagagaagggaaaacagctctctctctagtgagaaagagaggggacttcccagagggaaagaccagcctggtggatgccgggactttatagtcaggcttgaggaggcagtgtctgatttacataggggtcacagattggttaatcagatatgacatttacatagcaggtggggaaggctggtggtccaccctaatcttattatgcaratgaactctccccttggccgcagccatcttgtcagctccttattgtacmcttggctggcggagaagggaggatggagccaccattttgaacatgtctagtcctaggtagttctttcctgccggcatctacccgtgcaagcgcctggcttgctcgtctatgtctgtagcttgactgtataggttgctgtttgttagaaaatgatttggggccgggtgcartggttcacgcctgtaatcccagcactttgggaggctgaggcgggtggatcacctgaggtcgggagttcragaccagcctgaccaatatgaagacaccccgcctctactaaaaatacaaaaattagccaggtgtggtggcacatgccggtaatcccagctacttgggaggctgaggcaggagaattgcttgaacctgggaggcggaggttgcagtgagccaagatcatgccattgcactccagcttgggcaacaagagcgaaactacatctaaaaacaaaaaaagaaaaggaaaaaaaaccagaattatttggggctgcttttcatgaaaaggaaaatgttaccaagaacttctgcaccctcactatctgcctaagtaatttcttaactcctgtatcaccagcacttcaggagtctgaggcgggaaaatcgcttgagcccaggagttcgagatcagcctggacgacatggtgagatgccatctctacaacaaatacaaaaattagccaggtgtgatggcatgcacctgtagtcccagttacctgggaagctgaggcaggaggatagcttgagcccaggaggttgagggtgcagtgagccgtgattgcaccactgcactcccacctgagtgasagagtsagatcctgtctccaaaaaaaaagaaagaaaaaagaaaaaaaaaggactagagagagaacacaatcagggagggtggagaaggatactggggacaaagccagggcrggagtgagtgttcttggagcttgttctgcagaggcaacagggtaccaggccagcgaaaggagtggcaggaggaggcgggacctggtctttttccttccttgggcattctttgtgtaggcctgttttgggccaaagcagcccttgagggtggcaatgtggcttggctctcctttctgggacatgacccctgacaagacgacctgccctggcaatacctgcattggtagctgtccaggtcctggagctgcactcacacaagcattacagagaccatcctttcccaggcacaagctctgtttttcttttataatagaggatttcgcacatcagggacaaataccttaaatcactagagtatatttgccaggacattccatatatcatttgatatggtttggctctgtgtccccacccaaatctcattagaattgaaatgagaattgtaatgccaagtgttagatgagaggctgggtgggaggtgattggatcaagagggtggagttcccccttggtgttcttgtggtagtgagtgagttcacgagatctgatggtctaaaagtgtgtggcacttcccccttcactttctgtctccctctccatatgtcccccaccatatgaagaagatccttgcctccccttcaccttccgtcatgattgtaagtttcttgaggcctcccagtcatgcttcctgttaagcttgtgaaactgtaagtgagaagtaaacctcttttcttcacacgttacctagtctcaggtcattctttatacagtgtgaaaacagactaatacattattctaatcctgataaacacgtttcagggtaagtatcattatccccagtttcaatatggagaaacctggtttcaagtaggttgagtaatttacctaaggtcatacaagtcatcagtgtctgtgttggctgctgagagtagctgggccccaagtttacagtctttactgctctaccttcctccattggcaagtgaggccggttgtggtggctcatgcctgcagtctcagcatttgggggtgaggcagcaggatcgcttgagatcaggagttcaagaccagcctgggctggccttgaacatagtgagacccagtctctacaaaaattaataaaaataggccagatatggtggcacctgcctgtagtctcagctactcaggaggctgaggtgggaggattgcttagggctgggagttctgggctgtaatgagctgtgatcgcaccactgcactccagcctgagtgatagagtgagaccctgtttcaaaaaaaaaaaaaaaaaaaagaggaagactgttttgggctcccaggatagtccttgtagagctgtggaatctgtatactatagtaactatcttactaagtggtgctgtccctgagacatatatagatatgtgtgtgtatgtgtatatatgctactttgtgcatttayatataaaaataaatattatatatgtatctgtaaaatacatacatatgccctgcattttttctaattacaggcagcaagccttaccatccaaatttccagatcgtattgaaagcttgagggaaaaacgatgaattcataagtcaactggcacaagcttatccctctgaaaatgatttttcactcttgaatccctgggacagcaccggaactatctccttgcaagaggacacgcccaaacatcagtgtcagaatgtgtggtttgctttgaaattgcagccttggctaaaaccaccaaacccaggataggagaacacaatccctgtctaaaatgtatgtatctatacatttttccattgaaaggttgagtgttttcttaagagagggtcccacttgatcagaaaggggaagttggatgttctgagtcctcacgtgaacagcattattccgaggaaagcatttaaaagttactgaaaaacaagatccactttagaattacaggccaggtgcagtggctcacacttgtaatcccagcactttgagaggcctaggattgcttgagtccaggagtttgagaccagcctggacaacatgacgagacccccctctacaaaaaaaaaaactccacaaaaattagccgggtgtggtggcgtgcgtctgtagtctcagctactcatgggggctgaggcagaaggatcacctgagccagggaggtcaaggctgcagtgagctgtgatcctaccactgcactccagcctgggtgacagagygagacactgtctccaaaaaacaaacaaacaaaaaacaaaactacaaatagacttcatgtaacggtgtctgggaaaattgcattttatagagctgctcaggaatcttgggttaaaatgtggattgagtgtgcacatttgtttttattttttccctaaattacaccaagactgcagaaaagagatctgagatacatatatatatatatatwtatatatatatatatatatatatataatacatgtatatatagagagcgagagaaagagagagatgcgaaagtatggggaaaacgatagaaaatagcaacaaaattttggaagatagaagcagatacatgtgtagtgactgacttaggagctcaagtgaaattaaatcctaagccaccagtgggtggagctgagacttattctgatctataccacagaattctgaagaggctcaggaagtgtatttctggatctaaggtgaaggttggatctagtggctagaataagacaattggataaaaactgagacgttagatccctgcaatccttgccctgattccaggcccctagctgtctatttctcctccatcctggccaaagattagagatttattctctggagagagtttttggggacaaacagggccagtgaaacgagactcattagttacatattgaatgctggattttgagactcccagagtcctgcctccaaatgcttaaagccgaattgtaccctccagtctttttttctttcttttttttttttttttgagatggagtctcgttctgtctcctgggctggagtacagtggtgtgatctgggctcactgcaacctctgcctcctaggttcaagcgattctcctgcctccggctctcgagtagctgggactacaggtgtgccatcatgccctgataattttttgtatttttagtagagatggggtttcaccatgttggccaggctggtctcaaactcctgacctcaattcatcctcccaccttggcctcccaaaagcctgggattacaggcatgagccactgcgctgagcccaaacagtcttttaagaggatatatatattttatggcaaatctgaccagtttaagggaggaggcctgtagatactgacacttgagtcatcatccacagatgagctcgtaatcaaagtcacattgtcccatccacatgctgagtgcgcctagtaagatttcatttctcaactcttagtcctgaacagacatctgaggatggccaggtacctgaagaatgctgctaacatggaatacaggcacccaygcagcaaacaaaccaactaaagcaattttgaagccatataaactgagcagggaggaaaaaaaaaacgtaaaaaaaatcaatttgtcattgttatttttagaaaggtaggggaaaatattgcatctgtgaaacagaaacagaagaaaaaatattcagagaacaaaaatagagctcttagaaatgaaaaatatgacaggagaaatgaaaaatccaaaagatttggaagacaggagatgaaaaaagtcacccagaaggcagagcaaaaggacaaagagatgaaaggcaaagaccaaagatttttatttaaaaaacaaaataaaacaaaaaaacagagtaaacagataaactacaggtgggaaaaatatttgcaaactgtgcatctgagaaagatctaatatccagcatctatgaagaacttaaatttacgagaaaaaacccaaacaaccccgttaaaaactgggcaaaggacatgaatagacacttttcaaaagaagacgtagacacgaccaacaagcatatgaaaaaaagctcagtatcattgatcattagagaagtgcaaatcaaaaccacaataatataccatctacatcaatcagaatggctattataaaaagtcaaaaaataacaggtgctggtgaggttgyggagaaaggaaacatttatacactgttggtgggagcataaattagttcagccattgtggaaagcagtgtggtgattcctcaaagaggaaacagaactaccgttcaacccagcaatcccattcctggctatatacccagaggaatatgaatcattttatcacaaggatgcatgcacacatatgttcattgcagcattattcaaaatggcaaagaaatggaatcaactctctaaatgtctatcaacagtagactagataaagaaaatgtggtacatatacaccatggaatactatgcagccrtaaaaaagaatgagatcatgtcctttgcaaggacatggatggagcwggagtccattatccttagcaaactaatgcaggaacagaaaatcaaataccacatataaatgggagctaaataatgagaacacatggacacatggaggggaacagcacacactggggcctacctgagggcaaaggctgggaggagggagaggggcagaaaaaataattattgggtattaggcttagtacctgggtgttgaaataatctgcacaacaagccccatggcaggagtttgtctatataataaacctgcacatgtacccctgaacctaaaataaaagttaaaaaaaaatagcttacaaaacaaaacaaaaaaagaaaacaaatgagacaaacaaaagataaatgtagaagatatgacatccaaatagtaggagatatcgtaagtgtatatcayaatatatcataagaggaagtgagtggatagtatctaaaacagatgaaccaaataaaagcagtagctattatttagaacaatagggatgtgtaatgccagaagaaaccacctctgtgggaagtggaagaagttgtgggtcaaaaagctgttttattttagcactgtgagacttttaaggtagacatacatgtctctttaaaataaaataaaaataaaaacaagcatgactacatattaataacataaaatacaaattgattacaaaaaagaatacctagaaaaggcttcccatgtgattctgatgatcagtcactctttttgttttagagacagggtctcactgtgttgcccaggctggagtgcagtggtgaggtcgtagctcattgcagcctccagctcctggcctcaagcgatccccccacctcagtctcccaygtagctgggagtgcaggcttgccccaccatgttcagctaatttaaaaaaaattttttagtagaacgatgcctcactggtcttggacttctagctgcccaggctggtctcgaattcctgggctcaagtaatcctcccacctcagcctccaaagtgctaggactataggcctgagctaccacacctggcctgattagtcacttttggagccatttaatttatcaaggacctactgaagtkccagcactgtactaggcaagaaaaaaggaaggtggatacaaaacgcatatgattgcttctgttttctaggagctcagagtttaaatggaagagaccgaggctttgtcagcagcaatcacacaagctattgggtgaaatgacaragatgctctgagcatgtgaagtggagtagagaagacggctgggggcagcatggaggctggttggaaaggctttctgagtagggtgtcactcaagctgagttttaaagggcagacaagcttagaagtttaaggaaggggatgtgagggcgttttaggaagagaggatgtctgagccagagggcaaggtcaagaatcaacgtgcagaggttgagggagacagcggttcttcttgctaaagtgraacttgcaaggtgatctacacggctggagaagcagcaacgatggatcataaatgaccaggagggagaagggccagtatgtggactttattctaagggaacagagaacgaataatggctgtataggcaagagacagatacgttcaattttgtctcttagaaagatcaggatggttgctatgtgaaaaacaacttggtgtggcacaaggtagaaggcaaataggccagttagatggtggctgccatyttctaggtgaggaatgatggtgatggtagggacggagacagaaagtcaattttatagacttaagatgtaagattggggctgggcgcagtggctcacacctgtattcccaggactttgggaaaccgagccatgaggattgcttgaagccaggagctcaagatcagcctgggcaacaaagtgagatcccatctctacaaaataacaatgaaaatcaatcaatcaatcaatcagtcaaactagctaggtgtggtggtgcacacctatagtcctggctatctgggaggctaaagcagaaggattgcttgagcctaggaattagaggctacattgagctgtgatcatgccttgtactccagtctggacagcagagcaaggccttgtcttcagaaaagaaaaaaaagacataaaattggcaggacctgtcatggatttgatgttgaggttgggagagatggagaaggtgaggggaaaaacaggagtctagggatacccttgagattgtgtcttggagctgactgcatgagtaacctacgagatctacacaggcctatccctccatgaagaccaggtaaactggagcaaggaaagttttggacggaggaaggcagagagaatgcagttttgcaacctacctcctcgtgtatgtaaaatccaagcccatctttaaaaaaaaataacgttggccgggcacagtggctcacgcctgcaatcccagcactttgggaggccaaggcaggcagatcatgaggtcaggagatcaagaccatcctggctaacacggtgaaaccccgtctctactaaaaatacaaaaaattagctgggcatggtggcgggcgcctgtagtcccagctactcgggagtctgaggcaggagaatggcgtaaacccaggaggtggagtttgcagtgagccgaggtcacgccactgcactccagcctggacaacagagtgagattctgcctcaaaaaaaaaaaaaaagttaattaattttttctttctttctatttatttatttatttgtttgtttatttatttattttgagacagggtctcactctgttttccagactggagtgcagtggtgtgatcatggcttattgctgcctcgaactcctgggatccagtgatcctcccacctcagcctccggagtagctgggactacagatgcatgccatcatggccagcaaattttccaattccatcttgagagggctgagctaggcaaagccttcagcgggcttctcccagttgcctaaaatgaaacacatcaagttaaaattgttaaaaataaatgtccaaaggcaacaacttgaggatgtaaacaggggtgagaatctgtagattaatggtacatgtacaataattaggaggtttttgggagccccaattgaagtaattctctcactttgtgaacctccctgaaggtaggaggtgggaaatttccaaagcatagtgctcctgggtaatgacgctcaatttctaggagctattgggcccacacagcctttgatgtacagactatcagttccctagaatttctttcttgtcacccactgatataaacacctttgagttacacattcctgaaactcaccaagaattatcttccagaaatgtactgaaatgtctttgtctcagcttggcagcttcatttttcagctctctaaatccagctctgggtcagatgtagcaacttgcccgtgtgccagcaccaatgttattataaaaccacattgaaataatttttgtgacaggtttgagtagtaaatagagagatagcttagtctagcaaagcacttttcaattttaaataaaaaatctcctttaaaaggaaaaacaaatcccctcatacctctagcattggctgaaattattttttgttactgaatcatatacattgaatgggacataaattccttatgcttacagttcttaaactataaaaccaaaagagatactcaaattaaatttaaacaaaaataaaatacagcaaaaaaatcacaaaccttgtaagttggtaacattgagtccctctgtagttaagatatagaaggcgttggcagattattgctctgatcatagtgactagaaaataactggatcatgtgatatttcacgtacttcaaatctgtgggtgcaaatacgttttaaggcgtaaatttcagatgggagagagaactttctaggcaaccagagattgacaagcttctttcctagtggaatttgccaagtttgggcaaaggcagaggttcaggatgacaatgggcagaaaacactgtgaggaaaagagaaccactgtgatttttaatgaccttgtgggttggcatgaagaattggaagctggttttttctacctgccagttgtctctcacctgacttttactgaatgctggggctgtgattaagactagagtttggttatgttgaagtcaaaataaaaatgtagagataaatcgctaaatgtaacattttatttgggaagcaagaattgccatttggggcatacacaaagaccagatggccttcaatatgtccaaagaacaaagagaaggttggaggtcttatgaaaaggagaaatgttatgtactttttggaaagacagttcattggcactagtagagttttttggggagctggcaagctctgactgctgagtgactgcaatgggtaaaactagtcttagayttgcagcagatggtttcagttgttgttagataaaactggtttcagattacaataggcagtttcagcagtcaggcttgcaaagaatcacatttttgggatcgtgtcatgtgccccaagtaacttttccttctggcctctggactgtggttttgttcaacatgacaaggatggcccagttcacatgatcaattttcacagctagaaaggcagagaaggagtccctgcaaactttcagtccttggaagcaggggctctgaaataaacacaaaagacgtctcacccttgatatacttgaaatcaaaggagaactaaaactaacttaacctgaaacccaatcccaatgcatctcaatttcttgacagagaaaagaagatatcttgtctggggaaaataacattggcctcagtctctatggtgcttttatacacaatatttgacatgcaatgacaaaataagagatgtgctaggaagcaggaaaatgtgtgccagtaatacagagaaataacatcttatggaagcagatctatggatgacccaggttttagaatttgcaggggaactattatggatatgtttttacaaaacgaaagaaaatctagaccaaaaaaggatgaaagataaagaatttcaacaaataaatagattgtatataaagaaccagtgtcattcctggaacttaaaaatgcagtctttgaaaggaagaatgcatggtggatatgttgcaggttggggtgacattgaagacaggacttccaaattggtggagtgaaaaaaatcaacaattcctctctttaagaacaactataggctgagcgtggtggttcacacctataatcccagcattttgggaggctgaggagggtgaatcatttgaggtcaggagtgggggaccagcctggccaatataatgaaacycagtctctactaaaaatacaaaaaaattagctgagcatggtggcacactcctgtaatcccagctactcaggaggctgaggcaggagaatcccttgaacctgggagacagaggttgcagtgagccaaaattgtcaaaaataacaatgtatagaattccatacttttgtatgtcttttgtcagtttctggaatcctaaagaatagagtagcatcatgttcaagaatctctcaaaacaactggatctcagctaaaatcagtgggaatctgtgrtattttagcctagggatgctcccattcatcttgctccccttcccagctctgttggggcaagtcatgggattaaaattggggctgttgtgatttgctgttgagtgcaggaaaacccatgcccagggacattgttgaaaacaataatggtcttggtagcaaacaatctgagatggcaaacatcacagctagcctatcgttgaagtaggcaacagacaggtgcattagccagaaatgtgtgagatccaggtaatgagatagccatagtgagatagtcttgatatgctcccatttattcctgcttatctgcaagtttgcatgcatgttcagagttgctcatgcattcgggagaaattggacagggccccatttacattatctgcaagcagaagagaggacagaaggcccagtagaaagtacaaagtaggaccaggaccagctacataatttgcagcacctactgcaaaaatgaaaatgcaggaccccttgttaaaattattgtaagaatttcgagatggcaataacagagcattaaaccaagtatgagatcttcctaaacaagggacgctgtgtgaccacacaggttgcctacccatagttggccctggctgaagctgagtttgaaacagcctaaactttgtgttttctaaactggtaaagagtgaaaggacttactggctaaaggtatttaagcacaacctttgaccagtcattgactatcactaggcaaagctgactcagagtcagaccctagaagggcaggcttaaaaataaatgcaaacggctgggtgcagtggctcacacctgtaatcccagcactttgggaggctgaggtgggcggatcatgaggtcaagagatcaagaccatcctggccaaagtggtgaaaccccatctctacyaaaaatacaaaaattagctaggcatggtggcacgcgcctgtagtcccagctactcaggaggctgaggcaggagaatcacttgaacccaggaagcagaggttgcaatgagctgagatagtgcactccagcctggcgacagagtaagactccatctcaaataaaaataaaaataaaaataaaataaataaatgcaaacaagcaagcaaaaacataaaaaactgggcagacactccagcagctacacaccatgtgggagatagagtctacaaaagtaacccaggcaaatcactgaacaaacaaagtcagcaacaagaatgaccctagaaggagggaataagaagccagagttgcaacatattacctaaaatatttaactttcaacaacagcaataacaaaaaggatgcaaagaaacagaaaagtatgaccaatacccagtaagcaaagcagtcaatagaaactaacttcagatattggtattaataggaaatacttgaaagcagtagaaacccatcatactgaggaaaagtatgatgaaaatttctcatcatcaagaaaaaaatcaattaaaagatagtcacaataagaatttaaaaatagaaaataaaaataagtaataaaaatatgtaaattgtggaattgaatagtacaaaaatttaaaaatttattaaagggatcaaaagaaattgtgatgtgaattggcagaagaaagaattggtgaactggaagatagaccagtagaaattatctaatctaaaggaaagtgagaaaaaagaataaagaagagtaaacaatgctcaatgacctgtggaaaactattaagcacaccaaaaaggggttctagaagcagataagaaaaaagggcaggaaaaatactcgaagaaataatggctcaaaccttttgaaaaggtttcatgaaaaacattaatctgtacatccaagaaggccaacacactctaagtattataaatatgaggagacacagtcctagatacatcagtgaaagaaattaaaaatctaaataaatgaagagaaattctatgttcatgtattggaagtccaatactgttaagatagcaatcctctcaaattgagctatagagtgaatgcaacacctatcaaaattatagcagtcttttctaatttttggaaaaattaacaagctaatactaaaacttacatggaaatgtaaaaaaaagtcagaataggcaaaacaactttgaacaagaggaagaaggcttgagaactttcagtagctgatttcaaatgtcattacaaaataataatgacagtgtgataatagcataaggatagacatatgtgttaatggaacagaatagaataatcagaaatgaacccttacatttatggtcaattggttttgacaagggtttcaaggcagttccatgggggaaaagataatcttttcaacaaatggtactggaaaaattggatattcatatgcaccaataaagaacttatactttcacatcaagtcatatgcaaaaattggctcaaaatggattatacagctaactgtaagagctaaaattataaaacttcttaaaaaaaaactaagagaaattattgtaaccttggtttaagtaaagatttattatgtataatactgaaaacatgatttttatgaaaagaattgatgaattgaactctttaaaacaataaaaaaacttttgtacttcaaaagatatctttaagaaaataaaaagaagctactgacaggaaggaaacattttcaagtcacattcttgagaaagtacttgcatctagaatatagaaagaactctcaaattttaattaaaagataaacaacttaattaaaaacagccaagaaatttgaatagatattttaccaaagagatatacaaatggttaataattacatgaaaagatgctcaacacccttagtcattagggaaatgcaaatcaaaaccattatacactgctagaatgattataataaaaaatattgacattaccaagtgctagtcagtgtatggaggaactagaaatttcattcatcactagggggaatgtaaactggaacagcaattttgggaagcaatttgcagtttcttaaattgttaaacccatacttatgatattactcaggaatgtcacatttaggatctacaaaaagaaatgaaaatatatttccacacaaagacacgtatgtgaatgtttgaggcaggattattcataactcaaaactagaggcagccccaaatatttatcaactggtgaacagattaacaaaatgtgatgattgtatacaatggattgctattcagcaataaaaacaaatgatttatatatgttacatcattagacctcaaaaatgttttgctaaggaaagaagacagatgcaaaaaaagtatgcattgtaaaattatgaaaacatttataggaagcttttgggggtgatggaaatgttctgaagttgtgttgtggtgatggttgcggaactgtataaacttactaaaaatcaatggaatgtacacttatgatgggtacattttataatatataaattagctgtctataaagctgttaaaatgtgacaggacattatgataaacaaaaattacaagcccatcttactcatgaccacagatgtaaaaattctatccagagcattaacaaaccaaatccatcaatatatagaaaaggatacaggccaggtgcagtggctcatgcctgtaatcccagcactttgggaggctgaggtgggtggatcacgaggtcaggagatcaagaccattctggctaacatggtgaaacctcgtctctactaaaaataaaacttaaaaaaaattagccrggtgtggtggtgggcgcctgtagtcccagctactcaggaggctgaagaaggagaatggtgtgaacctgggaggcagagcttgcagtgagccgagatagagccactgcactcaagcctgggagacagagtgagactctgtctcagaaaaaaaaaaaaaaggatactatattaccactaaactatgttcattccaggaatgcaaggatagttgaaggttcaaagttgaccaatgcagttatcccaacagcttctgttggattaatgacaacatctctgctgcctggctcagtgtgtgcccacacagctggctaactagttacctgtcttccccaggtggttttttcacagcctgatggattcttcttgcccactgcctcccaccacaaaaacaatgagaacaccaggtattgcagcaattaaagagtttaataattgcagtgccagccaagcaagaagactgggagaaattttcttaaatccatctcctcaagaatttggaggcggccgggcgcggtggctcacgcctgtaatcccagcactttgggaggcygaggcgggtggatcatgaggtcaggagatcgagaccatcctggctaacaaggtgaaaccccgtctctactaaaaatacaaaaaaaaattagccgggcgcggtggcgggcgcctgtagtcccagctactcgggaggctgaggcaggagaatggcgtgaacccgggaagcggagcttgcagtgagccragattgcgccactgcagtccgcagtccggcctgggcgacagagcgagactccgtctcaaaaaaaaaaaaaaaaaaaaaagaatttggaggctagggttttataagggcactttggcaggcagggggctgggacactgaaacaactgattggtggaggatgaaatcacagggtgtctaacatcgtctttacacaattgagtcagttgccaggaggacacctcaggaccaggtggcttcgcttggtctgctgaaatgctaaatctgaaaaataactgtaaagaccagttcaataggtttcacagtagtgatgttatctacggaagtacttggggaagttataaatcttttttttttttgagagagagagtcttgctctgtcacccaggctggagtgtggtggcacaatctcggctcactgcaagctccgcctcccgggttcatgccattctcctgcctcagcctcccaagtagctgggactacagggtgcccgccaccacgcctggctaattttttgtgttttgggtagagatggggtttcaccgtgttagccaggatggtctcgatctcctgacctcgtgatccgcccgcctcggcctcccagagtgctgggattacaggcgtgagccaccgtgcccggccaggaagtcataaatcttatgacccctgcagttatgtgactctgaggcagtaagcaatttattaaaaaaataagctaagcaatggcagcttattgtttacctttgcctattctttagcaaagtttaagccactattataattttaatcttgtcttatgcaatatcctaacaaggggtaggcatcagtttttcttctctcaaagtttaactacaaactaaattcctcttatagttatcttggcctccgcactagaataagcaaagcaaaacaaaacaattcagcctgtgaagttagaagcaagatggattcaatcatgttagatttttcccattacttttaattctgcaaaagcagtttcaatttaggcatccagtcccctgccttgagtgtagcttcatctgayacatggactgggctgctacctgtgcctataccatgaggcacatgctacacttctgactgagtgaggctcagctgcagcttgaagcagatgggctttcctacagttaactttccagagtaagcaggagatacccatccagtccatgtatttggcggccattactatggctgtgcaagtgctggtaatgccgttgtccatgatggtagtgaaaagtccatgaaactcactatacataatctttaaagaggatttctgtagaggaaaccctcaatgtggccactttttttgcactgttggagaatatttaattccattatagaggaaaggaaataaataggatgggtgaaaatttataaaatatgttaaatacacataatgattaacttatcagcttgcaaaatatatgcagaattcttgaaaaatgtgaagtttagatagcagttaagtgggtaaccagaaagacattttctatgataaaaaggatggaacagacaagaatgttccwtatgggtagaaagggagggaaatggcygggcacagtggctcactcctgtaatcccagcactttgggaggctgaggtgggaagatcacaggtcaggagttcaagaccatcctggccaacatggtgaaatccgactctactaaaaatacraaaattagctgggtgtgatggcacgtacctgtaatcccagctattcgggaggctgaggcaggagaatcgcttgaacccaggaggcagaggttgcagtgagctgagaatgcaccactgcactccagcctggcaacagagcgagactctgtctaaaaaaaaaaaaaaraaaagaaaaaagaaaaaaaagaaaaagaaaaaaaagaaaaggagggaaataactttcttcaggtacagatcattgatacggtttggttctgtgtccccacccaaatctcaccttggattgtaataattcccmcatgtcatgggggtaactggtgggaggtacttgaatcatgggggcgagtttttcctatactgctcttgtgataatgaataaatgtcacaagatctgatggttttataaggggaattcccctgcacaagctctctggcctgccaccatgtaagacgcccctttgctcttccttcatcttctgccatgattgtgaggcctcctcagccatgtggaactgtgagtctattaaacctctttcctttataaattacctagtctcaggtatgtctttattagcagcatgagagcagactaatacaatcatgtccctactagaatgacagatatgtcaccctcaaattggctacccatgagtgcgcctgctatgatcccattctggcccacattgctctgctcaagaaaatgcagataaaatccttcgatgttcattagcctaattgttgccttccctagaggtgggcatacagtggtatccagggatgctcaagtctcttatattatatatttgcatataacctactcacaccctcctgtatactttctattttgtttattagagacaaggtgtcactctgttgcccaggctagagtacagtggtgcgatcatagctcactgcagctttgaactcctgggcccaagtgatccycttgcctcaaccttctgagtagctgggactacagttgtgcattaccatgacaagctaattaaaacaaatttttatttgtacagtcagggtctcgctgtattgcccaggatggtcttgaactcctttgctcaagaaatccaccctccttggcctctcaaagtgctaggattacaggtgtgagccactgtgaccagtcttggccccatgtattttaaatcatctctagattatttatgatacctaatgcaatggaaatactatgtaaatagttgttatactgtatttttatatgtattccttttattgttgtactgttattttttattgtttttctttttctgaatattttggagctgccattggttgaatccatggatgcagaacccggggatatgaaggacaactgtgcttgcctctgagatccaatgtgtttctctcacagatcccatgtgttttattgacttcagcctcttactcaactctgcatggacctcaactctggtcattgtaaccacaccatcaacagggaagactgatgcagggaaaaaagaaagggaacatatgaatataattggaattcagaccgtgtgcttcttccacctgcttgcaccttatcctaagtatacacctatcccatctctttgtcctggctttttttctgtgtgtgtgtgttttttgttttttgttttttttgagatgaagtctcgctctgttgcccaggctggagtgcagtggcgtgatctctgctcactgcaagctcctcctcccgggtccacgccattctcctgcctcagcctcctgagtagctgggactacaggcgcctgccaccacgcctggttaattttttgtatttttagtagagacagggtttcaccgtgttagccaggatggtctcgatcttatgacctcgtgatctgcccgcctcggcctcccaaagtgctgggattacaggcatgagccactgcgcccggccgcaatgccatattatgtttcaaattctatattaaatccatgttgcaagagtacagaggttaacttaaaatttaaaactctgctttccttttctccttccttttttttcttcttttcctctttctttccttcctttccctcaccttcctaaataatcagtcctaaagccattaggtagggcagagcaagagacgtatccatggtggtgttatgggaaaggggtctgaatccagaccccaagagagggttcttgaatcttacgcaagaaagaattcggggtgagtccatagagtgaaaataagtttattagagaagtaaagaaayaaaagaatagctactccgcaggcagagcagtggtatgagctgcttggttgagtatacttacagttatttcttgattatgtgctaaacaaggggtggattattcatgagttttcctgaaaaagagcaggcaattcccagaattgagagttcttctcccttttagaccatatagggtaatttccggattttgccatggcatttgtaaaatgtcacggcactggtgggagtgtctttcagcatgctaaggcattataattagcatataaggagcagtgaggacaaccaggtcactttcattgccatcttgcttttggtgggatttggccggcttctttactgtatgctgttttatcagcagggtctttgtgacctgtatcttgtgcagacctcttatctcatccagtgattaagaatgcctaacctcctgggaatgcagccctgcaggtctcagcctcattttacccaacccctattcaagatggagtcactctggtttaaatgcctcggacagtggggacccatgatggcccagagtagagagtcagagcccaagtggggagagaggaatgtccatgctgggatggccagagtagaacatcagagccttaatgaattgatcacatcgcatgtaaaattcaattccagattcattgtagccgtaaagtgagaagcagaacaacaagcctctaggaaatgatatacaagaatattttctgaccatgggggtaggaaaagtttccttaaaaagggccatgaaaatcacaaaagagattacacattaaaaataatagcctgtttgaagataaaagattttcttaattaaaaaaataagataaaacacctttaagaggggggaaaaaaaggcagtcttcctcctgtttcctggcatacaactcctaaaatccttggacttgccaaagtgcaggctttttgtatgctcatgttgactgatagctgcagggtggggctggtcacctgaagacaaakgtatgattagggggttgagacttaacctcrtctcccaacctcaaaggaagggtgggagctgaaggtcaagttgatctgatcacaacagccaatggtttaatcaatcattcctaagtaatgcatcctccataagaactcaagaggacaggrtttggagaactcccagatagctagacacatggaggttcctggagggtagagcgactagggagggcatggaagtgccacaccccttcccccttacctcaccctaggcatctcttcatctgtatccttggtaatattgatacaggagatataaagaaactatttaggcagatagggcaaaagagtccttggtacggtttcccttttaacaaaaagcagccccaaatcatttcttttctaatgaagagcagtctgaaaaagcaagctgcaaacgtagataagcaagctggaagcttgcttgggtgaatactagcagcagtgccaatagagcagggctacctgagggccagkcatgttcaatatggtggctccatctccccttttctttgtcaccatgtgtgcagtagaggaacaggccacatgggtggccagcttcgttgtgtgctatgcaaatggcacacctagtcctaaccagtttttcgcgcactatgtaaatggcacacctggtccaamcaatcttttgcaccctatgtaaatcagaccccacctcctcaagctcatctataaaagcttctgcatttcactgcagaagcggaaacccattctctccaggaccccctctctgkgctgagagctcttttctttcttttgcctattacacttctgctcttaacctcactctggagtgtctgcatcctagtttctgtggccgtgagaaaacaaatcttgagtatttaccccagacaatgatgtcgcttcaacatcccttacaataaaccagtaactgttaaagagagagagagaaacagagagagagagagagaaagaatgaaaaggcagtcaaacaagtgaaaagagacatttgtgatgaacaaaccaacaaagggcttgtgaaagaatatataaatagcttctataaatcaataagaaagacaaacaacaaaaactaaaactggataagacatctgaataaatacttcaaaaaagagcatatttaaacatccaataatcacatgaaaaggtattaaatctcattagtaattatgaaaatgcaagttaaaaccacaagttatagcactacccattgggtctgcatagctgaaatttaaaagtctgacaataataagtttattggcaacgatgtggagcagagggaattttcatatactacttgtggtgtttaaattgttaaaaccactttggaaaatagttttttaaaatgtattaaagcgaaagataccacatatcctgtgaccaaaaaaatttgctcctaaacattccacccaatataaatgcgtccttattgcatgctgaaagacataaagaaggatgtttcttgacagcattactcatacaatatatgtcaacaataaagaagtcataactaaagtatataaaaaacacaagccaataagaaaataaccaatagaactatagacataaaatacagtcactttacaaaagaagatattcaaactaccaataaacaggggctaatttcatgaataatcagagaaaccacagtaaactaaaaccactattcaataaccctgtacatccatmtgaatagttaaaagcaaacaaaccgaaccctctgacaattctaatggttgacaaggatatatggagtaattagaactctcatatattgctagtgggagtttaaacttttacaacatcatttggctgtttttattaaagttaaacatatgcctactctgtgacctaataattccactgctagggaatatacctaaaagaaatgtgaacacatgcatcaaaagacattaacagcggcagtatctgtaatagttctaaaatgagacaactcaagttcataaacaaataattgtgatgtattaattcagtggaatgctttacagcaacaacattaacaagccagttctacacacaaccactcaaatgagcctcacaaacaatgttgaaagatgtcctgcaccaagaaggcgtcacgtgtgacttcatttgtaggaagtcaaacaaataagaaaaacggaaatagagtgattagggatgcatggttaggtggtgaaactgcagctacaccagaccaatctggttcaacttttatgtaacagagttgtgagttgcttttcagctgccatgaaccctcaggcatgccaagatgccttgagcatgccaagaggaaacaaatgtgcaaccatagggggaacctaagtgctcaggccaggaaaggggactgaattaagaaggggacaccacatggcaggatccaggatccaatcagattgtgctctggcatcaccccattgcaagatgcctccaagcatcacctcattgcaagatccactcaaatcacacctcattacctgacctgagtgcacagcttaaggaggcactgctttgggagctgtctctggtgttctccttacttattacaagtaataaaatcctcatgctaaatcctccttagttgtggtcattgtgttgccaccggccaagtgacaaaacccacttgttgtgtaggtcacagaactatragaaaaagcaaaaaagtgcttaccgttgacaaagattctctccttggccaaactctagccaggttccttggagtgcttttgagtagaccttgactttggcttataaaaactagagattctcaacataaatgatttagacttaaatgaacactaacgtagtttctagcaactcaagaatatatcccttagatgatcctggacccccttaagcaacatacctgaggacctcaatgctatcaagtgaacttactgttttttccagccaacacctgaccataggcccctgaccgtacttacagtatttactaaaaagttcttacaattgtgaatccttcctctgtccctttgggatgtatatgtatmtcctacaactaggagtggttttcacaaggatagaaaagccattcctttaaaaatgtaatcatcaggaaggagatggccactgcctcccagtctgtatgggaagatagagtttaactttgatattgccagctagtacattcagctggccttatcagcacttacactcacaaaccctttgtaatttttccactccttgcttctccacttgcccactccctattccttcatctccctgtaaaatrcccagtcacctctggacaaattagagttcagttcatgtaggatcctcttccctaktgcaaaagttatcacagattaaaatgggcttaccattttaactagtgttctgcctttgtttgtatttcacgccataaaaatggagtgagggagagggtagaaaatagtgatgggaaggcacagagggagcttctgggtgctgtcaacagagagagtcaaactctgtaaaatagttgaaaagatttattttagccaaatatgagtgacccatggctcatgacacagccctcaggagctcctgagaacatgtgcctcctatgtgttcaggcaagaacttggttttatacattttagggagacaaaaggcatcaatcaagacatgtatgatgtacattggttaggtctggaaaggtaggacaactggaagtggggacttctaagtcataggtggattcaaagattttctgattggcaattggttgaaagagatattaccaatagaaaggaatgtctgggttcctgtgataggggttgtggagaccaaggttttatcacgcagatgaaacctccaggtagcaggcttcagagagaatagatagtgaatagttcttatcagacttaaagagtctgttctatcagtaattccaaaagagagaagagtataatgaggtatgtccagctcccccttcctatcatggtgtgaagtagttcttcaagctaactttggaatgcccttggccgagaggaggggtcgattcagatggttgggagacttggaattttattttyggtttacagtgctgatgttctgtttctcaacctgagtgttggttactcaagtggctgctttgtgctaagcctttgatctgtccatttcttgatttgtcaacacttctgtaggtgtgtggttgtacataatgtttaaaaaatgttttaaaaagagataacttgtaatcccagcactttgggaggccaaagcaggcagatcacgaggtcaagagatcaagaccatcctggccaacatgatgaaaccctatctctactgaaaaaaaaaaaagtacaaaaattagctgggcatggtggtgcrtgcctgtagtcccagctactcaggaggctgaggcaggagaatggtatgaacctgggaggcagagcttgcgktgagccaagatcgcgccactgcactccagcctgggcaacagagtaagactccgtctcaaaacaaacaaacaaacaaacaaaaaacaacaactctgatcyccggatgcttggggagactgatttgagtaataataaaactccggtctcccacacagctggctctgcgtgaattactcttttgccattgcaattcccctgtcttgataaatcrgctctgtctaggcagctggtaaggtgaacccagtgggcagttacagaacgcaagggatgctggccaacttctttggtatagcaagctctgaataaattgcctttgcctgttcttatttgggtagtctccatttgtttccacaagtgacgacaatggcatgacatctgaaaggggagttgttctatatggaaggggcacagccaccatctgcatcactgaaatacatttctgagtcactaactatactaatcatgctttcacctctgtggacacatgatctcagccattatctaaccgcttccaccagtccgcctcaagtttaaggaatattgtaaattgaatccatggtaaggattcttgggtaccacagcaaatgattcgttcttctttatctatcctcctttacctggattcactgacatttctctttcataattcattctcctgctcgtccctctttataacctttctgcattccaaccctttccaagcttctagccaatgttcattttccctctcttacttccaaggccagtcttagtccccagccccaaacaaggaataaactttggaagaagtttccaaaaacaggcttggaatttccawctgggatatagtatgtcttagggagattccatgggaggtctattcgtgatgggttctgcaaagaggaagaaagaagacctatttgactttgaaaagccttgttccaactgtgagagtctgtagcctcccgattagacagaatgaaggatggagtcctggcatttacccattaaagcaatgacgagtaggtctaatttgtggtatctctaactgatagtttgcattttaaggttaagatattttattgcttccagatggtcagctaacttccagtcmgaagagcattactgcagagtttaagaatagctatgatgcagagagagattttaattatcatgtaaaggatctaattaaaaagacacacagtggtcggcttttcaygcgctcaagcctatgaaaatcagtagtttaaaaaattaccttaaggaggaaattggaaaattattcaatttggagcagagatacttgaaaaatttctcaaatwggtgaactagaattaggttaactgcctgtttctaggtaccttgattttcatgttgttccttctatcctgttatatggcacagacttgtgaaggttccctaagtctttttacttgttagtttatttccggaaggaataaggaagattmtctccaatcagtcaatcaagcaagcaagtaagcaagcaagcaagtgatcagtttcttgggctctgaactaactctgggttcagatcctgatacttccatttattgcatgatgttgggcaaagtacatactccctatgagcctcattttcctgatctataaaatgataaggtttctggagatttcacaaggcaatcaatgaaagttagctcttgctatctgcagagttttagaacctgcacctattcacaggtgacggtgaggactctatagaagacagatgaytactggggaagattctacagagagatactccgcatgtgccctgtcttctctgtaacatcctcttcctgatgcctgagctgtgcagcatacgaatattttgcaagaagagcagtgatgttggtagaagttgtgggacacagagtcctgctggggccaactgggatctttggagttaatgacttagaaccaggaagctgctgatgtgtgatacagcgagcttgaatagaaaatgtttttcccacttccctccctcctttccctccctctctccttccctcttttcttccttcctttcttctttccctccctccctcccctctttttcctttcttctttccttccttccttcttgccttcctgcctacctgccttcctgccttcctgccttcctgcctttctgccatgttcagaagtcagacttaaaagaataagaaaaaggtttctaggccatacctcttttttccaagaaaaaaaaaaaargcacagaacactaactaaatgcagcagatgtcagccacatccagaagtccaggccagttcacctaactcttgtggacactgaggttctgataattagtataactagttctgataactaagataggccaagtcactccctgctgccagttacacagaggagtgggacttgtgcccagaatgtatacagagctctaatgactcaataaaataataaatgatctatagaaaaataggaaaaggatttgaataaatacttcacaaaagaagatctatgaatgacctacaggcacatgagaaggtgctttccataattcatcatcagggaaaatgcaaactagaaccacaatgagaaaacatttcctactcactaaaatgrctaaaatgaaaaagactgattttactaagtactggtgaagaggtagaagagctgaatttctgatgtgttgctgatgggaacacagcaactctggaaaccagtttaggagtttcttatgaagttaaatataaaggtaccatatgttctaggaattctactcctaagcatttatttacttaagagaaataaggtggggctcagtggcttatgcctgtaatctcagtacttcgggagacygaggcgggaggattgcttgagcccaggagttccagatcagcctgggtaacagtgagacccagtatctatttaaaagaaaaaaaaagagagaaataaaaacatacatccatacaaaggcttatgtaggagtgttcacagcagttttatttctactagcaaaaactggaaacaatctaatgtccatcaacatgcgaatagataataaaattggaatatctccataacatccataacatggaatattattactcaacatcaaaaaagtatggattattggctgggtgtggtggctcatgtctgtaatctcagcctttttgggaggccgaggtgggtgaatcacttgaggtcgggagttcaagaccagcctggccaacatgatggaatccctgtctctactaaaaacacaaaacttagctgggtgtggtggcatgtgcctgtaatcccagctactcgggaggctragtcaggagattcacttgaacccgggaggcagaaattgcagtgacccaagatggwgccacttcaccccagcctgggcaacagagcdagactctgtctctaaaaaaaaaaaaaaaacaatgtgtgaactattgatagatgttacaatatgaatgaatctcaaaatattttttattctgaaagaaagaagtcagccaagaaaaagtatctattgtataaatgcatttatacggaaagtaaattaatgcttttctgggcctggaattgggaaagattgactgcagaggggcatgagggaagtttaggggatgatgaaaagattctctgtcttgaaagtggaggtcatattttggttgttacatgaatgaatgtatttgtgaaaacccactgaaatgtacacttaggtgcattttattctgtgtaaattacacttagataaaattgatttaaaaaaaaaaaacagagaaggctaactctaaagccaaaccaagctgggtgcagtggctcatgcctatgatcccagtgcttcaggaggctgaggcaggaggattgcttgaggctaggagttcaagaccagtctaggcaatatagcaggatcccatctctacaaaacaaaacaagaaaccaaaaacacttttccaggcatggtggcatgtgcctgtggtctcctaatcgggagactgaagtgggggaattgcttgaacccaggagttcaaggctgtaaacagctatgwtaatgtcactgcactccagcctggatgacagagcagactctgtctctaaaaaaacaaacttaaaatccaaaccaaaaacacaaccacagttttttttttttttgagacggagtctcrctcttcgcccaggccggactgcagtggcactatcttggctcactgcaagctccgcctcctgggttcatgccattctcctgcctcagcctcctgagtaactgggactacaggtgcccaccactgcacctggctaattttttgtatttttagtagagacggggtttcacagtgttagccaggatggtctcgatctcctgaccccctgatccgccygccttggcctcccaaagtgctgggattacaggtgtgagccaccacgcccggccaaycacagttatgttaaagacttctgaatgggctgaagaattactatggacctgtaaccaaaactcataggaggaaggaaactcaactgagccaaatgagaaattttcatggtttcttcaggaagaatttctttctttttttctctttttctccagaggaatttcccatctatagtggtttacagacagctgtgtttctccaaccacrtttgtggtctggctggtgaagactgaaggacagatcgtggttacatggttctatgtaaaatgacattgatcacgttgagaataaaactaagtttcttgtaagtggcagatgataatggaagattaggggtttctggactcagaaaatgccagtgaatatgctttcataagtctatactgagacaggaatgttctaakattggtgatgatattatacatgtgaaggcacagggcagatattttgctgttggcttcatggatccccataaagaaaatcttgctgtgaattctctgctgtatagagcacatgtgggttttctcctcctatgagattcaaatatcacctttattttttgtatatagaaataaaagtctgtacatgcaaccgcagacacaaaccaaattccagtggaaatactctgtatttcaggctgaagaacataaaacaaggaccacggtggtcagccttgtgacccatctagtccagagaccggtcttttatttcttcagttcatgaattcattggcttattcagccaacattcatagtgaagctrctatgtgctcagtgttgaagacacagaatgtggcttctttctttttttttttccttgagacacagtttcactttgtcccccaagctggagtgcagtggtgtgttctcagctcactgcaacctccacctcctggcttcaaggacctctcgtgcctcagcttcccaagtagctggggttcaggcacaggccaacatgcctggctaatttttgtatttttagcagagacggggttttgccatattggctaggctggtctcaaacccctgacctcaagtgatctgcccaccttggcctcccaaagtgctgggattacaggcgtgggccacagtgcctggtccagaatgtgstttctgacttttaagtctctcacagcccactgggtaacacaataaacaaataattacaatgcaatatgacaatctaggtgagcatccataatgttttgagaatgcacacagggagtaatttacacaacctagggaattaggagagattttgcgtgcacgcgcacacgtgcacacacacacacacacacacacgcatgcacgtatgcacgcacacagagatgcccaagtccagtttggtaagaaatcgttggccttcaacattttctcaaacaatccatgatgaacatatcatccatggatttctttaaaccaacataaggctgaaaataacaaacaaaagaaataagtaaaagagaaaagttgcttcgtatgtttcttctagttctgtgataaaaaggatgtatcatcatatttcctttatcctactaatgcaaaacccatcttctggatatgaaaaaagaaaatagcatgttggtataatttttttattcttctacttttcttttttttttcagtcggagtctcactctgttgcccaggctggagtgcagtggctcarccttggctcatggcaacctctgcctcccrggttcaagtgattcttctgcctcagcctcctgagtagctgggattataggcacccatcaccacgcccggctgatttttgtatttttagtagagacggggttttgccatgttggccggactggtcctgaactcctgaccaggtgggtgtgatctgcccacctctgcctcccaaagtgctgggattacaggcgtgagccactgcacctggcccatctaatttattaatgtrtatggatgtatttactggttgctattatgcaattatgcagatacatttccccccagatccacaagatacttggatttggttacctaattcttgatttccattctttgtcctgactttttttcctttgagatagcttcaacctacttgtcctaggcaaaaaagatcaataagaaaaaatgtcatttgcgatttttttaatgacattatgaaaatgcagtttaataatacagcactctgggctgattgtgtaatgagaaggagaggaaagcctttatttcttgctccttgatttgaatccaaaccaggttggtgtccaatcctctgagaaacctatggtgtcagcctctacaccctgctttctccaagggatctctgtcctcccagttgtgggtgtgtgatgtctacccacttcaagccatacccaggctcaaccccattccctggtctgagagtcagcttggcctcagtcagcaggasgcttagactcagggagataggatatacagtgtttacaggctcagcatctgctgggcccggctgctgatccagctctgaccacatggcccaagctcaaggctgcccttgaaccctcattctctctctggttccctgtatccaggccaattcctcaatcctctgcttggtagccattagttaggtgccagctatttcattgtcaatgtcctctcctgggtccctgtacccccaacctgtggcttcctctgtggcctgaggacagagcaaactggtatgaataagatccctgtgtatctcctaccctcaggtgatctggcactcagtttcccgttgctgggcctctcacctattgttgctccttgaatgtcacctttcacctgcccacctgggctgtttccatcacctcctattggttttgccyccatccccagtgcctgctgtcctgccctcctacctcccacagtgccctgtggacamcatcccctgaacgacacccagccacacctacacctagcagcccaccttcggtctatctcatcttcctgtggttggatctcccatatatagtgaagataaaaaatggtcatttgcaagactttcctcatttgctctacggcagtatttgctaaagtgtggcgtccatacctctgacgccatcagggacgtctatggatgggcatgttttgtaaaaaagttaatcacttaatgtacattatgagcaaatatagcttgctttctccctccttcctttctttctttctttttctttctttctttctttttcttttctctttctttctcccttcccttcccttccttccttcctcccttcctttctctttttctctctttctctctctctttctatttttggacagagtcttgctctgtcaccaggctggagtgtagtggcatgatcttggctcactgmaacctccgcctcccaggttcaagcaattctcctacctcagcctcccgagtagctgggatcacaggcatgtgccgccactgtcagctaatttttgtatttttagtagagacagggtttcaccatgttggccaggatggtctcaatctcctgacctcatgatctgcccacctcagcctcccaaagtgctgggattacaggcatgaaccaccacgcccagccaaaatatagctttcaaaacaaaccagcgagaaaggcatcagcccactctggttcagaactcaaactcagacttccyggttcaaagcctggttcttcagcaagcaactaaacgtctccatgcctcaattccctaatttgttaaatgggcatgataataatggtacctaccttatagaattcttgggaggacaaaaataatttcatgcacgtgaagccttcaataagttaaaacaaagcatgaggcatagtaagcatctaatgatatttgctttattactttgtgaatatatagctaattgaaaagaggagtgagcttttttaattaaaaaatggggctgggcatgatggctcatgcctgtaatcccagcactttgggaggccaaggccaagagtttgagaccagcctggtcaacatagtgagaccccatctctaaaaaaaaagaaagcagataatagtacagttggtacttacacattaagagattgataaatatacccattagggaaggctaagctgctgtaacaaacagattgctcaaattcagtagcttaatgtacaagaagtttattattttcttaacggtataggrtaagtatttctggttagcaagtggttttcctccatgcggtatctcagggccccaggatacctttgtcttgtcatcatcatctgcatgctcaaggctgggtttcaactttcagattctagcacacagaaaaggggaaaagaagaacttgaaagaggcctagagatatctgaaagcttctaacccagacagctcacatttgactataacttagttatacgttcactcctaacaacaagggagactgggaaaagaagtccagcatgtcccaggcttggatgcacaggtaggtaactcaatgtaaatgaatgaagtttgggaaatactggtttcgaagtgtgtggcaggattcttcttaggggcagggccaaggagcaagatagcaggaaaggcttccccatgacaggcaagggccggtgaatwttaggcccactgrtacttaatattgaattttacttttccccattctccattgtaattccctgacacactctgctcttacataaaatctgttaacatacaacttgcttggaggtgcctggggcaggaagaatggaatttgacagaataatccccaccgcaaagatgtcatyactgtaatacccaagaacctatgaatatacagtgttagcttacatggcaaaagggactttgcagatgtgattaaaactaaagaccatgagatgggagattatcctagattatccaggtggacccaatctaatcacacgagtcttcagcagtggagaatcttttctggttgtgatcagagaaccggagacatggcagcgtgagaaaattacagcctgacatagtttgctttgaagacggagaaaggggtcatgagccaagcacagtgggacgcttcaagaagccagaaaagggaagaaaagattgttccctggaacttccagaaaggagtgtaattctgacaacaccttgatcctagcccaatgccatctgtgttggatttctgacctccagaactgtcagataacaaatttatgcagttttaagccactgagttggtggtaatttttcacaggaactacagagaactaatataggaacctacgtccctggttgagaagaaatgttagtgaggactgggcttggtggctcatgcctataatcccggtgttttggaaagcccaggctggagaattacttgaggacaggagtttcagcccagcctgggcaatacagcaagaacccatctctacaacataaataaataaataaacaaataaataaataattagctgggcatggtggcacatgcctgtagtctcagctacttgggaggctgaggcaggaggattgcttgagtccagtaggtcaaggctgcataagctatgatcataccactgcattctagcctgggtgacagagggagaccctgtctcaaaaaaaatgttaatgaagggagatgaagacatggacaaatgttgaccaggtgaccaaaagttctatggagcccagcgtagcaaccagagttaggtggcttccaatctagatgagctagatgagcaacccagagaatctctcccttggaagtacttggagagggcactggacttcccgtagcagctgagatggaggatattaaatggaagggtagcccatgagcctggggaacttgaggatgatccatttacatgttcttggctatgaattaagttaaagatggccaaggtaaaatcccacaaacttttatttatcccagaaattctacctgtgccatgaaaactccagtaatcttgctcatttccaaagctcttgcagaatgctatgggctattctgagtgagctgttaaaattatgcttccctgggtgttttctccaaacaagttgtcccattcagcaaaaataactcaagaagctgtagtttcaaagactacctcctgaggctttgtgaaaccacccagggtagctggccttgaggctaagtcaccacccattacagagaggtagttctcccctatcaactagcaaatatagaatgagaaaggcattgagggtaaacaaatatgcatttattacaactttggtgtgtaggtgattggatatctggttgtgacaaaggaagtgaaatggagcagagatccccctttttagggccctgcactgtccccctagaaacctggactccacccagaaaccttttcagaaatctggacccgacctggaccccaccaaatgaatccactgacaagcagacttcaggtaagaggaaactcaagactgaactctaaccaccattcttttttctaaatttcttcctgaggggcctgaagaaggtcacgtccacgagccagagctaacgttttttttctgctgatcccaaatttttagacataacttgctttctgaatcaatcacaaatcagaaagtctttgaatctgcctataacctgtaagccctcacttcaagatattccactcttttataccaaaaccaatgtgtaagctccacaattttgyctgtagcttctgctttcctgaaatttacccygccwttattttattttattttattttattttaggagacggagtttcrctcttgttgcccaggctggagtgcaatggtgcgatctyggctcactgcaacctccacctcctgagtttaagtgattctcctgcctcagcctccagagtagctgggactacaggcacccaccaccatgcccgactagttttttttttttttttcagtagagatggggtttcaccatgttgtccaggctggtctcaaactcctgacctcaagtgatccacccacctctgcctcccaaagtgatgggattacaggagtgagccaccgtgcccagccaacccatgcctttaaaaacccttacctgtgagccatcggggaggtctggtcttaaacatgagctgccctgattctccctgcttgatgctgtgcaaataaatgacttcccttccaccgctggaaaaacctsygttggaagtctggaccttactgcattgagttagcagactcccatttaggttttgtaacagaaggtgtatctagaacactcacaagcagagttctagacctttaaaaagaggatggaatcagtggctaaacaaataaatgcctccagctcgtgaccctgaacatccatatttattcttgtcaactgagagcaggacttgccaggcaggaccagaattgcatgggcactgagtgcagtcagggggtgtgggtgagtatggagggccctccgtagctgttccccttgtgagtgatgttcctttgaggtttgaaccctggtcatcccctgtcgttcccagatgccccactcaggcctgagtcctgctgagcagggtcaggccgacactgcatctgtgtgrcctgtgacagtgacagctcagtctctcggcctctccacacactcaccccaaagcaagcactgatcctattaagggtttattcatagcaacaacaggaaatggagaggcagtgaaaagtcagtgaaaagtcacctcctgtgttcctcctttttcctttttccacttagaatccttaaagacaggcagtcttcyggttctacaaacctttaatacatttagaaaagatacacagattgagtaaagtagaggtttgcccctgagaaggactggagtgaggctcatctacatttcagatctttctttayttttcttttctttttttgacatcaaggcttgctctgttgactaggctggagtgtagtggcacaatctcggctcactgcaacccccacctcctgggttcaagcaattctcctgcctcagcctcctgagtagctgagactacaggtgcccaccaccacacccagctaagttttgtatttttagtagagatggggtttcaccatgttgtccaggctggtctcaaactcctggactccacccgcctcggcttcccaaggtgctgggattacaggtgtgaccaccgtgtccggcctcagaagacctttcctaggccaaggcattgccaggcaggtgggccttgggaggagtgtctgggatgctgaattaagacagagatggggactgggarcagaaaggagggaaagggtgttccccaaggcagctggttggattagatcccctgaagttcgatgacaggacaacaggacaggcacagaagagcccatccttcaggggtaggyctcattgtttctcctagctacaatttatttatcatttatttatttatttattatttattttgagatggagtcttgctctgtcacccaggctggagtgcagtggcacaatcttggctcggctcactgcaagctctgcctcccgggttcacgccattctcctgcctcagcctcccgagttgctgggactacaggcacccgccaccacgcccagctaattttttgtatttttagtagaggcggggtttcaccatgttagccaggatggtctcgatctcctcacctcgtgatccgcctgcctcggcctcccaaagtgctgggattacaggcatgagccaccgcacctagccctagctacaatttaataacgttaacattatgatttatttaccatttgtctttcctggtagacaataagccccatgggggcaggaaacatgtacccaccctgccctgcacagaacagcacattgtaagccctcattaagagttcagtggatgaatrgtcacttagtagattttagatacattgtagatgatttctagacaaacagttgcacgtgttaggagctctktgatagggctctgcagaggagtgggattttaaactgggccttaagagggtctggttaaagggaatccaacagtagaaaggatgtatcttaatgaaaatacaaccccagggctgctatgcaacttggctagtaggcttcaattgctttttcatggtggatcttatcaggaaaagacgtgaaacatgcacacctgttacatgtatatttatttaaaaattatttacatgcatgactgcttgtattagttgcatatactagaagacagaagctccaatattttcttcctgtatcccagtgggttgtcttatatccacactttttttttgttgtttttgagacagagtcttgctctgtcgcccaggagggcaggtgcaatctcagctcactgcaacctctgactctctgagttcaagtgattctcttgcttagcatcctgtgtagctgagactacaggtgcacaccaccacatcctgctcattttttgtatgttttcagtagagatgtggttcaccatgttggccagggtggtctcaaactcctgacctcaagagatctgcccgccttggcctcccaaaatgctgggattataggcatgagccactgtgcccggccttgtacctacactttgcaagccactcgtgctggctgatgacatcttggtcagagaaagtgacctggggtacagggggyatggcctaagtctcaaagrcaagtggattctgatgcttgttttcaccaactactggcctttctcatttgcagtacttttttttktcttttttagagtgagtgtctcactctgttgcccaggctggagtgcagtggtgcaatcatagctcactacagccttaaactcttggtctcaagtgatcattctgcctcagcctccaagcagctgagattacaggagtgtgccactatgcccggctaaagtttttattttcatttttgcagagatggggtcttgctatgttgctcagtctggtctttttttttttttaatcttttctttttttgaggaagagtcttgctctgtctcccaggctggagtgcagtggcaagatcttggctcacctctgaatcctgggttcaagcaattctcctgcctcagcctcccatgtagctgggactacaggtatgtgccaccatgcctggctaattttctgtatttttagtagagatggggtttcaccatgttgggcaggctggtctcgaactcccgacctcaagtgatccrcccactttggcctcccaaagtgctgggattacaggcgtgagccaccggattcagcctcagactggtcttgaatttccaccctcaatagattctcccgcctcagcctcccaaagtgcttagactgcaggcgtgagccactatgcctggccaactgtagtaattttaatagttaactattgtaactattgtagtattgtagccaattgtagtaattaatagttaataacaacattaactattaggttggtgcaacagtaattgtggcttttgccattaaaagtgatgacaaaacccacaattactgttgcaccaacgtaataatacttattgagtgcagaaaggctgaaattctaacagacaatggctaggccatatgtgacaatagaactctgaccggaagaccgggaatggtggctcacgcttgtactcccagcacgttgggaggccgaggcgggtggatctcttgagtccaggagtttgaggccagcctgggcaacacagggaaacccacctctactaaaaatacaaaaattagttgggcacagtggtgtgcacctgtgatcctagctactcgggaggctgaggtgggagatcccttgagcataggaggttgaggctgcagtcagccgagactgtgctactgcactccagcctgggcaacagagtaagaccccgtctcaaaaaaaaaaaaaaaaaaaaaaaagaactctgactmgaaacatctgccgcaagtggctcaacatggccaggacatggctgccagcttctcagatttttgcccaattttcaattttgaaccaaccaaagaaagtgaaatatgtcctcctcactgatcacatggaaaccctgcttctamgttagcccacctcccgcttccccagaccagcggccttcagtcagggtgcacttgtccctttcacgccccagaagcttttctttttcttttctttctttctttcttttttttttttttttttttgagatggaaactcactctgtygcccagrctggagtgcagtagggcgatcttggcccaccgcaacctctgtctccygggttcaagtaattcttttgcttcagcttccctagtagctgggaggtgtcccaccacgcccagctaatttttgcatttttagcagagacaagatttcaccatgttagccaggctggtctcgaactcctgacctcaggtgatctgcccaccttggcctctcaaagtgctgggatttcaggcgtgagccacctcgctcagcccctagaagtttttcttttctttcctctgcctgcctttgagtttctaccacatgcaaggaatgatggctgactcccttgcaatagcaagctcagaatagacagcctttgcttgtcctcacttgggtggtctttgtttatttccatggtgcttattagatgcctagcactgagctaagcaatttacacatattagctcatttatgcttgcaacttcaagaggtaatattatggatattattcctgtttgacagctagaaaaataaaaatgggtaatgcccagagaagtgaggtaatttgctcaaggtcacacagcagattcaatggtgaggctaggctgatgcatgtacaatgcctgacacacaatacctaggcactgagcacagtcagcacagcttggtctctccctgtttacttatctcccgtgtaagctccccaccactgctacactgtgaattcttgaagcggggaggtagattcatgtctttttgtttcctcctttaaaaaatctgtagctgggcgcggtggctcactcctgtaatcccagcactttgggaggctgaggtgggcaaatcacctgaggtcaggagttcaagaccagcctgaccaacatggagaaaccctgtctctataaaaaaaaaaaatacaaaaattagcctggtgtggtggcatgtgcctgtaatctcagccactcgggatgctgagacagaagaatcgcttgaacctgggaggcggaggttgtggtgagccgagatcatgccattgcactccagcctgggcgacaagagagaaactccgtccaaaaaacaaaayaaaacaaaataaaaaacaccctgcaggtaggaggccataatcctaagaggattaacgcaggaacagaaaaccaattactgcatgttttcacttataagcgggcactagacattgagtatgtgtggacatcaagatggggacaatggacactggggctactacaaggggggtgggggggaaatggattgaaaaactaccagccgggcacagtggctcactcttgtaatctcagcactttgggaggccgaggcaggcagatcacctgaggtcagaagttcgagacctgcctggccaacatggcgaaatcccatctctattaaaaatgcaaaaattagccaggcgtggtggccctgcctgtaatcccagctacttgggaggctgaggcaggagaatcggttgaacccaggaggtggaggttgcagtgaacccagatcgtgccactgcactccagcctgggcaacggcaagacttctctcaaaaaaaaaaaaaaaagaaagaaagaaagaaaactacctattggttctattggttactatgctcattagtacctgggtgacagaatccgtaccccaaaccttagcatcacacaatatactcatgtaacaaacctgcacgtataccctctgtgtctaaaatgaaagttgaaattataacaaccaaaactccagtatcttttgcaatgctcagggttttatgagagtgaaggctttgcctcgcgaattctagcaagagtaaatgagttggccaaacctctgtagagagatgagtccctggtttcccttggcgaaactccaagtattttaactcctgttatggactcagatgagatgcgatacatttttaacagacaaacaaaggggacagagtcatgtcaaaggcatatgttatttgaaccatggttgagtgaaaaatgtatttgaaataaaaaatccttgcacagaaataccattggtctctttcctttcagtttgctcaaccaaccaaccaaagaaactcttttgataaagcttttgtagttaaactgagttttatgactgggaayggttttgggtgccatccaagataaatttcttcttttaaagtcaagaacagatttattctttggtgaccgaaatgggactggaacccagaccttatggcgagcagaccacacagccactgaagtgtagttttgttggtttcagaagcagctggtatataataaacgtttagttgattatgtttttgcatatataacatgctaggcaggtccttaaacttttagggtcattgactatgttgagaatctgatgaaacttacaggtcttttccccagaaaaatgtctatgtaacatgcagatacactttttcatctgattgagagctattcatgaactcctgaagtctagctagggtgtctctagggagaggagctggctagggacatggaatagagcttttcagtagaatcgaaggcccaggtaaggttagacaccaccaattggaaatgcctgcaggctttgagatgatgtggtttttccctgggtacacttgctcttgcctttgtccttgggttgagaaagaagaaggtgaaattgattcagagttggggattgctaggctggggcagtggaaaaatatgatatacatgtgcatgatccttaatagcaggccctattaggaatgtgtttgaaataaatgactaaccatgaactccagaaagaggagggaaggaactccagaggggatagagaggcatggacacctgggaaggagaaggaagttgttggctggagaatatgtttgtttggagttgagaatgggagaggtaaaaagctagggaacagtaataacaggctgggattttagtgcaggattgcaggagtggaaggctcctctgtgaatacagggttcaggatgaggccatgacagtgggtcactcattgagtagtgtccagtgtcatttttgaacacagaagctgcccagaatgcgtgcaggagctgagaggaggctcctggaggatgcatgataaagccaaaagttaatttgcatcagggacctctctggctttagagaaagcacagaaatctctctgaaattgaaatttgcctggaaacttctcgattactctgaggctgtttcctctactttgtttcctgtcttccactcccaaatatgcacacgcttgagagtcagcctcaagcacatacttagagccacttactgcttctcgggcaccctagcccaatgcctcagcctccctggcttcagtcctgcggctgagtgaatgttcaaaaattatttttgcagaagcttccattgattgtgctagctccatctgtagtgtggttataataacacccaactcaactggatactccatgagatgctcagtaacccaagtttcttcccacacascctctctcttgcctaacatgtgtggctaaaaatcatcccttgggcctttttaactgttttgtgtccactttcaggtagattwtacaaagcatgcgccctgaggacccgattgcacccaggcagagaattccaagggaatgaaataaaaagactatttttttgcatatacatttctatgttaaaaatcaaaacttaaaataatacacaggcaaaaacaaaacaagaaaccaagccccagaaaaaaccaaaacaaccgcaaaaacaaaaacaaaaactttaatgagatcaaaatgatgaggggaaaacgatcagctccatttagctttgctgcccgatttttattagttggcggcctgatttctattttagacccaaggaattaaatggatcaaccggggtgggggggcgttgaattccagtatttcgagttcctgggttttgggaagaggaagaggtagtggaaaaccaggagccaaatgaatatgcttcttataataaaatttgaacagagcagcgggtgggcctagaagcagtgactggggaggttagaattcttgcacgcagagaacccccccaagcccgctcacgcccggcctggctccgaaggtctcagaatccgagcctccaggccagattttccctctagccattcctggccacgcagcgcggagccgcgagcacacagaaaaggatgtcttcatcgccaaccgggatggaacgaacccgcccgctcagggagtactgagaactaaagggtccctccagcgccggccgcagccagcatgccttgactgcctccatcccgcgcggtccccactctccagaagcccccgccctgcccgggtgcgcgcgcgcacgagtcggcgaaccggggagctgtgcgttcggcagcctgcgggcggcggcggcggccgccgacagcctctcggggacagggtggcgaagagcggcggaggaggagctggcgccgccgccgctcccctcgggccgcgccccgccctccgccgccacctgcgcgtcccctccgggctcctcagctccggggctgtgtggctctcggtgccgcagcggcggtgtcaccgcgtccgccaattgggagactcggcgttttggctcccgggggcgcgggacgagccgcgcggccggatctggcgagcggagggtgattcggcacgcgtacctccccgccgcgctgcccgcgacgttttgggagggggtagagaactgctgtgacttttgaggtccgactccttccggccagcctcgcgacgcgccagctccgagacaggccggtgtgccctgaaggccccgaaggctctcggcgcggtttgggggcttggaacgtgtccgggagccggcggcgctgtgagcgctggtgagtttgccggcggggtggggtggactccgcgcggggggcggagaggacgtagcgctcggcccggcgcccgccccctagtgctgcccccactttgagagtaattgagacttgagcgtgactgcggagcctggaggatgcgggctccccgagcgggcttcccctctgcccggcgcgatggagcgggtcggtgagcggaacaaaggcgcctgcccgggggagcgggtcttccgctgaagagcgcgggtggcgcgccgcgacggccgcctgcgggccaaggtgggaggctgtgcggccccaggcgcggcgcgctccgccgtgggcgggcggcgatccctgagcccggcacctgtgcgccgctccctctgtgcctcccgggcagccccgcctgccggcctcggagtccgcggcgccggcggctagaggtccagaggcgaaccacttgctggtgcagaagagaaaccctcaaatccctggcctttcgcggagacgcctggaaggggccgtgcgccgtggactgagcaggcgtctcggggagcacttctgcagagcgaggacttccatgtgagcgattccgttctccccaccaccaatccgacctcccagccgtctccgccgcccgagcatccttgaggtgggacgagcaggggcytggatccctgccggccgtctggtgtgtgaggcttgcacggcccctggctgccccgcgcctcgccggagcccgagggggcgcaggtccggggcgagggccggccgggctgtttgatggcttcactgagaagagtcaaagtgctgttggtgttgaacttgatcgcggtagccggcttcgtgctcttcctggccaagtgccggcccatcgcrgtgcgcagcggagacgccttccacgagatccggccgcgcgccgaggtggccaacctcagcgcgcacagcgccagccccatccaggatgcggtcctgaagcgcctgtcgctgctggaggacatcgtgtaccggcagctgaatggtaaggacgcacgccggcgcctccggggctcgrcgcgggcgggccgggcacagggtgagccccagggtccttgcgcgytgcgccctgtgcctgggagccggcacatcctggctcccgcgcgctccttcttacccttcctgccccgtttcgggcagatggccggggctgctggaaagaacaacttgcctgattcttttctgtgccccacctgcaaatttggttttatcctggaaacatgtcagtacagttggctcccggtccccgcgtgcggactggaaatcattccctggcgactccagcccgagcgcagaaactagtggaggggccacatgggactggaggcgcgcgggcagacgtgtaggaggaaaatagtcttagagcccagcgtttggtggggtaccagtagggaacctgggagattggagggcttggatgtctgcagacaaagtcaaggccccaggtcgcggagctaatgcgcttaggtagtatatgggaggaatatgtcatctgtctatgaggcgagctgctcagctaagaatgaggactcctcccttcctgccgcctgtgtttctccttgggggctgcggaggggcgattgttaaagctcagggtgggcctgcgaagtttccagaatgtagcacagagagatgtggcatcccattagtgacagttgtctgaatctgtcccatctaaaatgttgtgctcagtacttcaggagaagagggagactttttatgtgctcttgtcacacctgggccaggtcattggacactagctgtccccaacgtcagagtgagtgttacctacctgagtacaggcaggtttccaggatgcgtggggttatccaaggcagatacgtacttaggtacagactacctcctccctttctgagcttgtaactcatgttctcaaacgaactgcagataatcacgaagatcgtgataataataactgatggaattcttgctctgtgccagatgcgtgcaaagacattacaagtacattatctcactgtatgttcacatctgtccagcgaggctccacccatccmcagaggggaaatgagaagactaagcgaggggaggttaactaagttgccctgtgttaaataagatataactgcgccccaaacctctgtaatcggaataataatagagtctggagtcagaaccctgtgtctggttgaccacagagcctgtgcgcttgacctcttaggctcaaacttctatccatggttttcccctaagtgaaaggagtattaggtttgttgaaaacagaaatatgtggaattgcaaatacagacatataccttctcacattggaggatctcaactgtcttcactgtggtggcaaggggcagggagaaggaggatggcaaatggttcttttcaggctcaccaaaggtccctgctgggtactgggggagggatgggatggagggagaggggtggtcagatctctgagcaggtgaaaggacgctgcggtcttctcgaagccatttgacagatatccaggggatgccttgaacttgcagggtatatggcctgactgtcagggtagcccacggaarttatgcagaagctcttctctcaggtgtcagaaatatggcacagaatgcgacaaaaacccatagttcatttctggaggaatcagaaacttacggggtggccttataatttgggatagattcctgctgtagacatacccataggaacttcaaaggttaacctggtttccctcatcaggcttttctcagggacacaggttagtttagtatcagtttctttgttttatggtttttttttttttttttttttttttttttttgagacagggtcttctcgctctgtcaccctggctggagtgcagtggtgcaatcatagctcactgaagcttcaaactcctgggctcaagtcattctctggccttagcctcccaagtagctgggtctacaagtgtgcatcaccatgcccttctaattttttaattttttgtagacacagggtcttgctaggttgtccaggctggtctcgaattcctggcttcaagcaatcctcctgcctgggcctcccaaagtgttgggatgacaggcgtgagccaccatgcctggccccagtattagtttcaattaggagcattaaatattatatagctgtaccctaacttccctcataggaataataaaattctataataataactgatggaattcttgctgtgtgcmaratgtgtgcagagacattacaagtgcattatctcactgtatgttcacatctgtccagagaggctccacccatccccagttgagaaatgagaaaactaggtgaagggaggttaggaggctactttctacttgccacagacatacatgaacccactgaatctttacaatgacttgcgagatgggtgctctgacacccgcctgaacaacttgctcacagtcacccagctagtgagtgtcagagctgggaatcgaacctggaatgtcaggctccagaatggaggttcttagctcctgcaccagtgtcttgatcttcagcatgtgcatcagaatcactgaagagccctttaagacagatttctgggcctcccgcccaggtctcaggtgaagcctgagaatttgcctctctaacaaacttgggacagggccctcgacccactgcccaacagtctgctgcctacatcaagcagagtaaaggtagaaaacccatccaacctccaaagccagctcattttggggacttaagctgagagcttgcttcagatcaactggcgtctggcttccttctctgtggccttctgccctgtaaacagttcccggactggtggagtcaggtgctgtggggtgggaaggctgagttttcctgacttgcaagttggcagcaaggccaagttgagagcttttcctgggcaagctaagaatgcaagctgcgactaggcagatgttaccatcctgactgcctagtgtcatttgcagtgacatgaagcctgcagaaaaagagcagggaaaaattgtgaaatatagggggctcttcctctstctccacctggcccctcaagcaccttcatcctctgccggtgcttgttttgggtaatgcgtgtcccatctgttgatgccctccgcctgctgcagtgggaggytgctccgagaaggcaaagggctcctagtgcctggggagacacgtgctctcttgctctgcagccggtcttcattcattgctcccgagggtggagaaggaaaccttgaccttaatgttctttattcccttggaattaatggagaggctgctagagccagtgcactgtgcatgtaagagggccaaagccacttggtacagagtgggagccaggcattttaaaggttgctcaagtttcttaaatctttctcgtggactcctgtgaagtccaagcaggtgggatttatggagggctctacctcctcctggcttcctcttctttttttttgagatggagtctcgctgtgtcgccaggctggagtgcagtggtgcratctccgctcgctgcagtctccgcttcctgggttcaagtgactttcctgcctcagctcccgagtagctgggactacaggcacccgccaccatgcccggctaatttttgtgtttttagtagagacgggttttcgccatgttggtcaggctggtgttgagttcctgacctcaagtgatcctcctgtttcggcctcccaaagtgctgggattacaggtgtaagccactgtgccctgcctgtaggcttcttttttttttgagtcagagtctcactctgtcactcaggctggagtgcagtgatgcaattatagctcattgcaacctctacttccccggctcaagtgatcctcccacctcagcctccctagtagcagggactacaagtacatgctaccatgcccagctagtttttgtattttttgtagagatggggttctgccatgttgccagggctggtttcaagtgatccccacccccacccccttttcaccccacaccccacctcaggccttggcctcccaaagtgctgggattagaggtgtgagccacagcgccttgataggccttttaagggctggaatcatatttttgacttttttttttttttttttgagacagagtcttgctctgtcacccaggctggagcgcagtggcgcgatctcggctcactgcaagctccgcctcccgggttcacgccattctcctgcctcagcctcccgagtagctgggactacaggcgtccgccaccacgcccggctaattttttgtatttttagtagagacggggtttcaccgtgttcgccaggatggtctcgatctcctgacctcgtgatccacccgcctcggcctcccaaggtgctgggattacaggcgtgagccaccgcgcccggccattttggacttttaataccacccccatccctcagcacaccacagccccttgcacttaatggggcacttaaggtttattggttgatcaagttgttgggagctagtttgaggaggtaaatgatggccagataggaaataacctcaaggctgtaaagtctgggttgtgttggatggatgtggagaggggtgggggctgggaggactcagctagagagacagtgtgaggaagccatcttgcctccgccatcttgaggctcgtctagtcttcaccttcctgactgaagggaacgagatccttcgaggccctcggaagtgagccaggttaggaataggcaagtttcagcgtgttttcgttaaatgtatgatttcataacatgaatatggctttatagttaagccttgaaacaatgcagagattagggatgccaacacttgcacagtcaaaaatccaagtataatttttgactcccccaaaacttaactgttaatagcctgctcttgaccagaaggcttactggtaacataagcagttgattaacacttattttctatcttgtgtgtattatacactatattcttataaaaagtaagctaaagaaaaggaaatgttattaagaaaattgtatgggctgggcacattggctcatgcctgtaatccctgtactatgggaagctgaggtgagaagatcagttgaggccaggaattttagaccaacctgggcaacacagcaagacytcatctttacaaaaatcagctgggcatggtggtgcacacctgtggtcccagctcttcaggaggctgaggtgggaggatgttttgagcctaggagttcgaggctacagtgagctatggttgtgccactgctccccagccttctggctcaaaagaaaaaaaaaatcatgtggaagagaaaatatatttactattaattgagtagaagtggattgttgtaaaggtcttcatcctggtcatcttcacattgagtaggtgaggaggaggaggaagggttggtcttgctgtctcaggggtggcagaggaagaaaaaaatctatgtacaggtggacccacgcagttcagacccttgttgttcaaggggtcaacagcatattctttttttgtatataaaattaattcatctttattgtagaaaatatggaaaatctaaaacaattatacaggatacaataccatgttaaaaaaatttaacatgattgcgtgtaggctttgtacaagcattaggaaagtggacctagtggtcgggcacagtggctcacgcctgtaatcccagcactttgggaggccgaggtgggtggatcacttgggcccaggagttccagaccagtctggccaacatggcgaaaccctgtctctacaaaaaaatacaaaaagtagcagggcgtggtggctggtgcctgtaatcccagctactctggaggctgagtcaggagaatcacttgaacctgggaggcggaggttgcagtgagctgagattgcaccactgcactccagtctgggcgacggaacaagatttggtctcaaataaataaataaaataaaaaagaaagtggacctagagacagacggatttcttgttagaattcttctttatgtgatttttggctttctatcatgtttctgtcactttctgaggaagttacttatttctctcattttagaggtgagaaaggtgagaaacagagatactatgtgacttttccagggtgacacagctagggaagggcagagccaggttcaggaataccagggtacttcctcccaggagtccagcactttcctaataagtaaggggaaagagatggaggggtctggagcttcacttgcccctcgcaggctcaaagccttagagacaccctctcctctcytcagagtccacacgcaggacgcacagcagagctgtatccctgtgagcccagggcagctctgtcataagaagaaaggcaatcgattcaacttagttaccaaatttagatttcagaaggatagtgaatagaagtggagttgcttaaagaarttgaaaatctttgtagaaatggagagaagtcaaaattacctcttccagtcctgcccccaagccactcaggcacttgaagttggagtctgagtgataggaaaccaagacgctcctatatagccccagcacaccacaacccacccaacagaactccctaggcaaggagagtgatttggcacagagagaggaagagatttgctctcacaggtctccaaggtggagtcagaaagagaggaatggtggccgggcacggtggctcaagcctgtaatcccagcactttgggaggccgtggtgggcagatcacttgaggtcaggagttccagaccagcctggccaacatggtgaaaccccgtctctactaaaaatacaaaaataagccaggcgtggtgacgggcatctgtaatcccagctactcaagaggttgaggcaagataatttgcttgaacctggaaggcagaggctgcagtgagcagagatcgcgcccctgcactccagccagggagacagagcgagactctgtcttaaaaataaacaaacaaacacacaccaaaaccaaaaacaaaaagagagggatggcatttggaaagcatctccgttcattaatgccagaggtggtctggtgttatatttcttctttcttgyagcccacagatgctggacggtaccaccatttcctgcaggaaggagcgaagggagagggcacatgtgcatattaaaatcagttgctgcagggaacatcagaaggaaaccagggcagttcaagccttcatttgctgcacgcagacattccacagggattgaggacaggcgcgggccctgggttatggaaggcttggtcctaggaccagggccagggtgmtggaggacacccactccctttacctccaaggactcatggtgtctggttgcagttggcccctcctgaagaaatagggagtcctgttcttggacagccctcagatgcaggcacatctgtgttggcaggtgagtgtggtgggcaccctgccagtgggggcagctgccacctgcccagcccagaggtagcaggagaggcagccagtgtcattcttgctgaagaaacccaacccccctgacctttgctagttgccaaatctggagcgtcctttgtggaaaggaagaaagctcggtaattacttagagctaagagtgaccacaggaagttggaacatgagcacacccragcccaaggccagcgaagaaacaacctacgattagatgacctgcgagtctttaagaatatataagaagaaccaggcacagtggctcacgcctgtaatcccagcactttgggaggctgaggtggaaggatggcttgagaccaggagtttgagactagcttgggcaacatagcaagaccttctctctacaaaaaataaaaaattagccagacattgtggtgcatgcccatggtcccagctactcgagaggctgaggtgggaggaacgcttgagcctaagagttcgaggcttcagtgagccatgattgcatcactgcactccatccatcctgggtgacagagcaagacccaaactctaaaaaaaacccccaaaccagtgtattaaaaggacactcagggccaggcatggtgactcagggccaggcgtggtgactcacgcctgtaatgccagcactttgggaggccggggcaggtggatcatgagatcaggagttcaagaccagcctggccaacatggcgaaaccccatctctactaaaaatacaaaaaatagccaggcatggtggcaagcgcctgtaatcccagctactcggggggctgaggcaggagaatcacttgaacctgagaggcggaggttgcagtgaaccgagattgtgccattgcaccgtagcctgggagtctgggcgacagagcaagactgtctcaaaaaaaaaaagaaaagaaaaaaaaaagacagactgggtttgatttccactgtcacttattacctctgtgaccttgggcaagtcccttcactttttaagtgtaaaatgggactgtcatatgtcaggatgacttgaaattcaaaatgtatagcataagcatgaaacccaacacacggcagttgtaagaatacaaactacttatgggaagggccatgagtgctgtttcccatcatattcccgagacacttagagcagccctgggccatggtaggtactcaggagatgtttctttttctttctttctttcttttttttttttttttttgaaacagagtctcgctctgttacccaggctggagtacagtggcatgatctcggctcactgcaaactctgcctcatgggttcaagtgatcctcctgcctcagcctgcttggtagctgggattacaggtatgcgccaccacgtctggctgtgtgtgtgtgtgtgtgtgtgtgtgtgtgtgtgtgtgtatgtgtgtatttttagtagagacagggtttcaccatattggccagcctggtcttgaactcctgacctcaagtgatcctcctgcctcagtctcccaaagtgctgggatttcaggcatgagccaccacatttggctgtgtgtgtgtgtgtgtgtgtgtgtgtgtgtgtgtttagtagagatggggtttcaccatgttggccagccctgtcttgaactcctgacctcaagtgatcctcttgcctcagcctcccagagtgctgggattataggaatgagccactatgtggggccctcaggagatatttcttgaatggatgcatggacagctagcaatgcttcatagtagagtatggtcattgttatttgctttgtgaatgtcagacgaggtgagagggggtccttttccttataactttcttggactcttcagactacttttggatccttctctcttccatgtgtttatctgagccagactccatttccttcttccttctcctgccatcccctgctcctcctcttacttataatgatggtgcctttggctgatggcttttaatgcctaggagaagaaatggcagcctgtctgacaaacccaattacagaacacaatggtcattcatatccgttagtgagcacttccttgccgcgaggcgtagactagatgctaagagtacaatgaggtgcagagatcatgcttacttaggcattgtggaatagtgggaagatatctttgtggctttaccagggatgtgccaggtccctaaagaatattagactggctgggtgcggtggctcacgcctgtaatcccagcactttgggaggcctaagcgggtggatcacttgaggtcaggagttcaagactagcctggccaacatggtgaaattttttctctactaaaaatacaaaaattagctgggcttggtggcacatacctgtaatcccagctacttgggaggctgaggcaggagaatcacttgaacttgggagacggaggttgccatgggccgagattgtgccactgcattgtagcctgggcgacagggcgagactcttgtctcaaaaaaaaaaaaaaaaggaatgttacactgagcctggaagtagggaggcttgaactggtgcacggtaggtgcttagccggtgagtgctgaatttaaacaagaacacttagaaattttcatgcatgcacgataggtgcgaggtagtgagatcaccttgtggaaggtgtgaaagcaagtcagaagaaatggatgctcttggccgagtgcagtggctcacgcctgtaatcccagcactttgggaggccgaggtgggtggatcctttgaggtcaggagttcaagaccagcctggccaacacagcraaaccctgtctctactaaaagtacaaaaattagccgggtgtggtggcgggcacccgtcatcccagttacttgggaggctgaggcaggagaatcacttgaactcaggaggtggaggttgcagtgagatgagatcccaccactgcactccagagcgagactgtctcaaaaaaaaaaaaaaaaaagaaagaaaagaaatggatgcccttgagaggtggtcagagccagaactacgaatctgcgggattcctggcaagggaatggcatgagcagaagagtgtgtggggacatgtaagtgaggaggtgtgggagctccttggtgaaggggagtttgttaggaggactgggtggaggctggactgggccaggttttggatcctaggttggtttggacttaattgcataggcttggggagccattatgtgaccaggtcactatgttgacttaatgtgatgtcatgttgcggcttattgcatctggggatgattgggagagtgggttggaatgcagcagtagggcagggcacggtggctcacgcctgtaatcccaacacttcgtgaggctaaggtgggaggatcacttgagcctgggagttcgagaccagcctgggcaacatagtgagaccccatctctatttaaaaaaaaaaaaagagtgcagcagtgggtatagagagctggtgttgctggcgtggctggccctgccattcctctgagttcaggactcagcccaccctctgaacctcagagtgattttagttgcatgtcatttgctccctctgtgactccacgatcacatccagaactaagagtcaacatctggaattgctgcatttggaaaatctggtacagctttggggatctctgacctgagccctctctcaggctcccacttctcttacaccttgttgaggtccagcccccaaccctaccactgtttctagctccctgtgctcctgtccttccatatctggcctggggagtccgtcagaaatccccttgtcagctcctcgagtatccttacctcctcgtcatctgtggcatccaccagcaacccccgagggtggatgagcttattcctggggaacgtcccaccttggcaggcgttggtgccataggatgcaagctcaggtcttagctgggccctcagcatgtccagaacctgataatcatcattattattggctgttcacatccattagtgagctcttccttgctgcaagaggcagcttagatgctaagagtacaagaggtcacacctatctagacattgtcatctaattggaaggatacatttgtaatgttaccaggtatacatcaagtcccaaaagtgttacaggaccaataggttcatatgcccactgctcagtaactgaccagttacaccgagacagtaggttttgtggcagagaaagagtttaatgattgcagggcacagagtgaggagatgggaggagaccctcaaatccgtctcctgaaggagttctgggctggggttttgttttgtttttgatggagtctctctctctttcacaggctggagtgcagtggcacatttcatttcactgcaacctctgcctcctggactcaagcaattctcctgcctcagcctcccaagtagctgggactacaggtgcatgccaccatgccaggctaattttttgtatttttagtagagatggggtttcaccatgttagccwggatggtcttgatctcctgacttcgtgatttgcccaccttggcctcccaaaatgctgggaatacaggtgtgagccactgtgcccatcttgggctggggtttttaaggggatcatggaggacaaggggctggagaattggggtcatggattggtcagcataagagggatgaaattgtcaggatgtggaaactgcattctttggtgagtcagcttcttgggttcttcaggccagccgatgtcagcagtttcgctggtgtgcaggacctgaaagagtgtctcaaagggaaaactgaacgcttcatgtttaccttgttatccatggagcagttaaggggaattataatcttgtaataggatcgcagcctggcaacaaagcgagactccattgctacaacataactaaaaacctagctgggcatggtggtgcacacctggagtcccagctactcaggaggctgaggtgggaggatctcttttgagcccgggagtttgagactacagtgagctatgattgtgccactgctttccagcctgggtgacagagtgagaccctgtttctaaaatttataatcatcacaataaatagataaaaaatagggtctacatgattctaggacaattggtagcaaacaaccatgagcaagcaggtcagagaacaagctgacctagtgatgaacgcagaatgtgctgcaagcttggtttattttcatttctcccctctcttcttccctgattaattttataaagttcatacgggtttcttaatttttttatttttattttttgagaaggagtctcactcgttgcccaggccggagtgcagtggcacaatctcggctcactataaccttcacctcctgggttcaaatgattctcctgcctcagcctgctgagtagctgggattacaggcggccgccaccacaccccgctaatttttgtatttttagtagacactggttttcaccatcttggccagggtggtctcaaactcctgacctcaagtgctccgtcagtcttggcctcccaaagtgctgggattacaggcgcgagccaccgtacggggcccgtatgggtttttttttaaaggaatatttctatccctttccattttctatacctccctgagccaaagaggaggtgggctgtgctgggctggagggatccttcgggaggcggtggagacgggtggatggagtggcctgactccagattcagtctcctctcagctccccacgccctgagtgactgctgatctcaaatgacacagagatttgttcctccccgggtgccaccaccgcagcccacttcttactgggattgtcacagctgtgactgctgcaacaactgagtccgctgggatatgctgaggccagtgccagtctcgggtcctctcactccttctggattcagagatcatgttgcaggggcaagacctgacttcctagcagctccttaagggacaagagatggaatccagaattacagggaagccaactctccatgggtggcttttggcctgaaggatgaagggggaggggaccacaaagaagcagataaattatctcccgcttagcagtgcagtctggagatatggtgcccatgtggcccctgggaagaagtccagggagagggagtgctcactgccttccctcccttctccctccctccctcgcygccatcctcccttccacagcacttagaataaatgcaggactcacaggggctgaaagatcttcctctcccctagtgattgctgctcaccggtctttagactgctctgacatgtggatgacaatcggctgagccactgatagagaagttttcccttttaatcatgtccctgtcattgctaactgcagagtctcagctttgccatgcatgagtaataaactgctgccgtaatcacaggcgaccacgttcagacaccaacacacgagcgtgctgacagttaatggggaacagggttccagaaggacttcttccatcctagcctcggacacaagggaggctaattgtgtgattagtgtttactgaggaatgtcctgtagttacatacagcttgttaggtgctgtacttccctggtgaaagagcatgaatttgggttcaggagaccagggttctaggtttactttatttctagggaccaaagtttatgcatgtgtaaaatgagaccggtatgattgtagggtcctttaactctcagattatgaataacatctctttccctcattgtatttagtcagggttctttagagggacagatatatatgagtttgttaagtattaacttacacaatcacaaggtcccacagtaggcttttctgcaagtttcaggagcaaggagagcctgtccaagtccccaaactgaagaacttggagtccgatgtttgagggcaggaagcatccagcacgggagaaagaagtaggctgggaagctaggccagtctaacttttcatgtttttctgcctgctttatattcagctggcagctgattagatggtgcccatccaaattaagggtggatctgccttccccagcccactgactcgaatgttaatctcttttgacaacaccctcacagacacacccaggattaatattttgcatccttcaatccaatcagattgacactcagtattaaccatcacattcatcctattaaaatctcatgcattctccaaggaccatttcttttttcttttttttttagacggagtctcactctgtcgtccaggctggagtgcagtggcatgatctcagctcaccacaacctccacctcccaggttccatcgattctcctgcctcagcctcccgggtagctgggactacaagagkgcaccaccacacccggctaattttttgtatttttagtagagatgaggtttcactatgttggccaggctggtctcaaactcctgacttcatgatccactgccttggcctcccaaagtgctgagattacatgcatgagccactgcaccaggcctctccaaggaccatttcaaaagcccttcattctctgtaacctcccctgaccaccttgtcagaattaaatgtcctttcttctcacctcttatggtactttcagtggatcttcttttagcccttgttcatctctgtctttcctcaaaatgatttgttgtcatggccagcccagtagtttccaagagaatgggtttcattcattttttaaaaacccctctctgtgtcatttaggaattaatttgtcagcaagtaatttgttctcacttcacaagtccagaagtagtggtagctagcactgttttggcatcatagtgtcatagctcatgtcactatatttcttttggtcttttcctcatgattacaagatggctgccacagttccagccattgcatctttgtaccaggtagggattcctgtagcagtggccacatctgctcttattgtttactcaggaaagaaaatgttttccagaagtctacctggtaggctcctacatgtgagccaggacatagtctgatgaccaactttgcttcaagagaatagttgctttccagagaaaataagtacagtggtagcaaaagagaaggagaacgggaacagcatttgcattgtgaatccgcagtgtctaccatgccctctctacccctaatacattccattgaatattaaaatttagcaagattcttggccaactagaaattcaattaactagaatactgaaggctgtgggcattcaaacatacatacataattgtattttgtctgttaagacatttttacatctctgaaattgggagttatcttatgatcagtgacatgtcatcatttaattggtagcgtactttttccccctcagggtacataaaaatggagtatcttatagttgaaggcatcttagatttgatgaaatacagtagtattatggkatttttatatatatatatatatatatatatatatrtatgtataccatagttaaccatacacaactatttgattttgttgttttgttgttgttttgagacacagtcttgctctgtcgcctaggctggagtgcagtggcaccatcatagctcactgcagcctcgaactcctgggctcaagcctcccaagtggctggaactccaggtacgtgccaacatgccctgctaattttataaactatctttttctggagacggagtcttgctgtgttgcccgggacgctctcaaactcagagctcaagcagtcctcctgcctcagcctcctgagtagctgggacaacaagcatgcaccaccacgcctggctaatacacagctatttctattgaacatcaaccacatatcaagtattttgtgttaacttaattcgacatcacacctatttatactattatatctgttttacatgtgaggaagatgaaactaagggaaataaacaaattgtccagaggcacctaccagctgctccattctgagtctcctttgcgaagttggtactcactgcctcctgggtgtgggattgagtcttgctcggttggtggctgggtccaggactgtagggggggcgaaacgtgtgctggggtgagcacaaggatgctgtcaactaggatcaggatggttgcagggaaccctccttcacccaggttagtagtcactcgtgtgaaaagttgtaaagctgttaattccaggactctaaattatgctgtgcgagctgtaaatccagcccataattagaacaaaatgtgagaaaagtgaaattgatattaagttaattaaaaggctttgcttatatttgcaaggaaattagcacaacaaaacaggaatgctgacaagtgcacgttgtcaatttcttcttcatttgggcgactgtcagcaagcctcaggcaagttttgttccttgacttctgccccgtgtccttcctatgattgcacatccattgtgtttgtatcatggtggctttaattgggcaagatctagtgtaatcttgggacagtcatttttgaatggatgctaagccttgcatgggagcttcaccttccagctgaggtcccaggccctgaaagtgtgtcgggggctggaggaggggccctcagaggttgtgtgtcattgcttaggcacacgcttctcggaagctgatacaaatggctgatgcagttctcttgcgtcgagaaggtaactcctttgattccagggcacccttctcattcctgttcaccatcctgatctgtgccacagacctaggtttgagtgtgcagtgtagaattttagtttggagttcctggaagggaaagaacatgtttttttcttatggtacctattatactagggtctggatgagacaggtcaatatcaagcggcatagaactaccgtggtctctagttagggtggcagaggcaatgctgtgttcaccagggaattttttttttcctcttgggcacagagctaatcttcaggctcccctgcagttagatagggccatgtgattgagttcagggcaatgagaggtagacggaagtgatgtttgctatgaccaggcttggcccaccaaaactcctacggggtccttcatrccttctctctcttttttttcgttttctttttcttttttttttttttgagatggagtcttgctgtgtcccaggctggagtgcagtggtgcgacctcggctcactgcaagctccgcctcccaggtgcatgccattctcctgcctcagcctcccgagcagctgggactacaggtgcctgccaccaygcccggctaattttttgtatttttagtagagacggggtttcaccatgttagccaggatggtctcgatctcctgacctcgtgatccgcccacctcggcctcccaaagtgctgggattacagccttctctctttacctttcaatgatggccttggagttcacctcttggtggcatataagatggtaggatcctagccaggcccggtagtgtgtgcctgtagtcccagctacgtgggaggttgaagtgggagcagtgtgccatgatcacaccactgcactccagcctggggaacacagtgagaccctgacttcaaaaaaaaaaaaaaaaaaaagaagcatcctggtccctgagtgactaagtggagcagagtactgtgctgtccagccatctcctgctatctcctgtgtgggaccattgtgttcagccattgagattttggagcttatctgttatagcagctagtgttatttatggactaattcagttaggtaactacctaagtgacaggccaggctgtctactctccttttctgcccttgattcatgtgatcagcaaatattgattgatcttaaacaataagtggggggatggtgagatggttggattggatgccacctatttctaggtcagcttctgtgcttgacctgctattggatttaagaaaatagccttggctgggcgtggtggctcacgcctgtagtcccagcactttgggaggccgaggcgggcagatcacgaggtcaggagatcgagaccatcctggctaacatggtgaaaccctgtctctactaaaaatacaaaaaattagtcaggcgtggtggcaggtgcctgtagtcccagctactcgggaggctgaggcaggagaatggcgtgaacccaggaggcagagcttgcagtgagccgagatcgcgccactcactccagcctgggcgacacagcaagactccatctcaaaaaaaagaaaagaaaaaaaaaaaaargaaaatagccttgtttctcagtgttactagtactctatttacaggatgatggaatgattataatcatcccctacttaacgctgcttcttggagctgagggataagtattgaaatatggctaagttgtttgyaattataaacaactaaataatatatgcattgtctttgttacagtttctrctgaaaggaactggcatttttcaagatgagacaaactgaaaaggttagtttaagcattagcaattaaaaaaatcatgatttttgctgccaccgaattttaaatcatgcaaacatttatatttgtgccaaagttccacaatttcctttagagcaattactgaaatgcattcacaagataaaaatggagttcrgggaagaatatttaagagctctttaatgatgttaaaaactttgctaatttgccgtgtcgttctaaaatccactttaattttttttttctgcstgcctacccgtcttcctgcaattgaactgattccaggagacttgaataaaggggataaaatgactaataaaatacacaaatctcacgaaatatcttttcaagagctttttcttttttttcattagctgtaggtgaacactcgggaagataaaagcatccttgggctgcgtttacttgcagaaagcagtttggaaggaaaacaaaagccaaaaagtagttacaaatgggtggcttgaattaaacgctttttcttttacagtaaaagaaagggtcttgtatatgcagacccaaggggcggagtagactggtctaatgtcttcatcctcatcctctttacaagatctcagcttagcaaaactgcagttagtcactgatctgtagtccctctcccctagttagcatcattgcttggtgctccagccctttcttcagggccttctgaaaatccgcagccccgggggatcctgatccacttttcttcttccccatgagataggctctaatgttaatggttcacattttctttcttttttttttctgagatagagtttcgctcttgttgcccaggctggggtgcagtggtgcaatctctgctcagggcaacctctgcctcccaggttcaagtgattctcctgcctcagcctcctgagtagctaggattacaggtgcctgccaccatgcccagctaatttttgtatttttagtagagacggggtctcaccatgttggtcaggctggtctcgaactcctgacctcaggtgatccacctgcctcagcctcccaaagtgctaggattacaggtgtgagccacgccccagttcacgttttcattagagagtaagttcacaggtatttctcagggataattctgttggaaagctaaccttccatagagaaagtttgacagcattgacttccagacgagccagagatacagccctggccctgccagcaaccttcctagtcagctgatctccaggggtttcagacaatggacgaagcaagggctttggagttagacagaaggaatctcaaacttccctttggctactttacaaagccaagccaaagctggggctttggaaaaaatcacctaacatcaatgagcctcagtttactcatctggaaaacagtagctactcctataaatatgataaggacggtgtaaggtgatatttgtagcatacctggaagaacgcctgtaataggagaatgttgatgaatgatgttattgacatcgccgtggtggcagttactaccaatactgctctttggaacaagacatttggcctttccgggcctcagttttctgccctgtaaaatctagacaagataggaagggtgttcaggttctgtaattttatggatcagaaaggtagagtcgatgatggaaagtctgttttcatgtaaacagtggctggtgaggactggtcagagttgcattttgggaagccatgaaaaattcaatctagaggaataggaaacaattgtcctaggtgtggtggtttaaaaatgtatctacaggccaggagtcgtaatccctggcacggtaattccagcactgtgggaggccgaggccggtggatcatttgaggtcaggagtttgagaccagcctggccaacatggtgaaacccagtctctactaaaaatacaaaaattagccagtcgtggtggcgggcgcctgtagtcccagctactcaggaggctgaggcaggagaacccaggaggcggaacttgcagtaaaccaagatggtgccactgcattccagcctgggtgacaaagggagactcygtctcaaaaaataatagtaataaaataaaataaaaataaaaaataaaaaaataaaaatgtatctgcaaatttgacactttccccatcaaacggtagagtttaattcccctcttgttgatgatgcgctggcctccgtgacttgcttctagtgatcgaattcagtggaaataaygttccatgacttcagaggctggatcaaaaagggtgagrgagcctctgcctgagggtgctcttcagggacatggatctttgaagccgtgtgccaccataccggcttcgctgaagcccccatactggagggaccatgtggagagagagagagaaagvgagagagatgcccagggacccctggctgttccggcttccagctgtttgtgtctgttcagcgcaggagccagacacatgagtgagcaagcctcactccatctttccagcctccccagctgataccaagttgggcagagacgggctgttcccaccccaagcctcgctcaaatcgcagatccatgaggaaaataagtacagtcattgttttaagccactttttgggtggtttgttgtacagcaataaccagttggaacatgaggtcagtatccttgtgcttgataagctgtttttgatgatgatagtcatgctaaccgtaataaatgtaacaatagccaacatttatttatttatttatgtatttttggagacrgagtctcrctctgtcgcccaggctggagtgcggtggcaygatctcggctcactgcaagctccgcctccctggttcacgccattctcctgcctcagcctcctgagtagctgggactacaggcgcccgccaccatgcccggctaattttttgtatttttagtagagatggggtttcactgtcttagccaggatggtctcaatctcctgacctcatgatccacccgccttggcctcccaaagtgctgggattacaggcgtgagscaccgcgccyggccacaatagctaacatttattaagctctttcttaaagtatccagcaccgtaatgaagattttatatataaaagtgggtaatgaattttttcgggaaagtcttggatttatatgccatgggtagactgtgataacagcctgactattgcagtgggggttaggttggctaagaatttcagttgtctttcattcaagtttctgacagttgtcctaaaccaccgagcgttgagtttatttggaaatgcaagagtggctgttgtgtaatggctccctccccgtggacgacggttatctgacattgctcatcatacccagtctctgaaccctagcaccacagttccttatattgtgctgttccaggtcttttagcagcagagacaagaacacatttaatagagcctgttcttatttttcttttggagacagggtctcactccgttgcccaggctggagtgcagtggcatgatctcggctcactgcacccccaacctcccgggctcaagcaattcttgtgccttagccgccacagtagctgggaccacggatgtgcaccaccatgcctggctaatttttgtatttttattagagagagggtttcgccatgttgcccgggctggtctccaactcctgggctcaagcagttagcccgcctcagcctcccaaagtgctggattacaggtgtgagccactgcgcccagcttcttctttttttaaaattcttttttcttctatttatttatttttttccttttttgttgcctactattgctacctctgaagacagcctgtttccataagagactactgattttctactttttgtagaacctggagaatttggtgtttctataaataacacatcctggaaacctatagagtacatcattctctggagatttaaataagtactgcagacttcttttattctaattaagtagagtaggaagtaggtggcttgtctgaattatggccttataacagaggacacaattcaatattcctcacttttcctggagtgagaacttttaaaaatttcattcttggctgggctcagtggctcatgcctgtaatcccagcactttgggaggctgaggcaggcagatcacctgaagttgggagttcaagaccagcttgtccaacatggagaaaccctgtgtctactaaaaatacaaaattagccaggcgtggtggtgtatgcctgtaatcccagctactggggaggctgaggcagcagaatcccttgaacctgggaggcagaggttgcggtgagctgagatcgtgccattgcactccagcctgggcaccragagtgaaactccgtctcaaaaaaaaaaaaaaattcattcttaacttggacacacatcgtgcctgtagcttgaacacctaccaaagataagggcatagagcaggctagggcttcccatgcctgatggagctacatatttacttggggaactttggaaaaagtactaatttccagattcctcaagctggaggttcacattttgtagatatgaggtgggatgtgacttgggaatatacacatttttcttttcaaaagctgaatgggtgagtctaatgagccattgagatggttgatgccctgccctgcctttcctttcccttccttcaagcaatacatctgtaaaaatgttgagttgtcataaggctgttgtgacaattaaattcatttattcacatgagatgtccttccttccttccttccttccttccttccttccttcctccattctttgccttccttcccttcccctccctgcctcccttccttcttccctccctccctcccttccttcctctctgtctctctgtctctctctctctcttttccttcttttctttcctcttgctctgttgcccaggctcactgcccaggagtgcagtggtgcaatcatagctcactgcagactccaatccctgggctcaagtgatcctcctgcctcagcctcccaaagcgctgggattacaggtgtaarccactgttcccagactccttttcattttcttaatgatatattttcattttaattttcttaatatattttatttatgtatttattttgtttatttatttatttatagagatgaggtcttgttctgttgcccaggctggagtgccctggcacagtcatagctcagtgtagctttggactcttaggctcaagtgatcctcccacctcagcctcccaaatagctgggactacaggtgtgagccactgtgcatggttcaacacccttgttttgaagtacttttctagtcattttctcatgacaaaagctttaaagtcttcatatctgtgaaccatttcttggagatcttggcagatatcacccctagttcccatatctgcatctgtaaaaatgttgagttgtcataaggctgttgtgacgattaaattagtttattcaatgagatgtctgataaattcctggcctctagtagatttctttaaaaactttaaaaaaattgaggtaatgcattggctgggcgcggtggctcatgcctgtaatcccagcacttcgggaggctgaggcgggtggatcacctgaggtcgggagttcgagaccagcctggccaacatggtgaaaccctgtctcttcagagaatacaaaaattagcagggcatggtggcacgtccctataatcccagctactcaagagactgaggcaagagaattgcttgaactggggaggcagaggttgcagcgagccgagattgcgccactgctttccggcctgggtgacggagtgagactccatctcagaaagaaaaaaatattgaggtaatgaatacatatataatttactgtctttaccattttaagtgtacagctcggtagtaacaaatacatttatattctttttttctccaccattcctccctccctttttcccttcctggcacctggtaatcactagtctactctctgtcttcatgaggttcacgtttttaactcccaaatatgagtgagaccaggcagtatttgcctttttgtgcttggttgatttcacttaaaataatgtatgtcagttccatccgtgttgctgcaaatgacacgatttcatcatttttcagggctgaataatattccactgtatgtatatgacatattttcattatccattcatccattaatgagtacttaggttgattccataccttggcaattgtgaatagtgctgcaataaacaagggagtgcaaatatctctttgatatattgattccccctttttttttttggatccatactcagtggaattgctatatcctatggtagttagttctatttttatttttccgagggacctccatatggttctccatagtggctgggctcatttctcaatcaatgggtgctgctgtgttctgtggtttcgtggccaaggtagttggcactccctttgggggttgactgccttctttgagattgtagtgtcactggctgtgccgcctgccccaagccttcatctttctccatctgagatgtttcttttctttcttttttttttgttttttgagatagtgtctcratttgttgcccaggctggagtgcagtggcgtgatctyggctcactgcatcctcctcctcctggattcaagtgattctcctgtctcagcttccygagtagctggkattacaggtgcctgccaccacgcctggctaatttttctgtttttatttatttatttttttgtttgagatggaatctcgctctgttgcccaggctggagtgcagtggcacaatcttggctaactgcaagctccacctcccgggttcacaccattctcctacctcagactcccgagtagctccgactacaggcgccyrccaccacacctggctaatttttgtatttttagtagagatggggtttcacygtgttagccaggatggtctcaatctcctgacctcgtggtccacccacctcggcctcccaaagtgctgggattacaggcgtgagccaccrcgcccggcaatttttgtatttttagtagagacgtgaaatgtttctttggtaaactggattctagatgaatatgtttcattctgtttgctggtagtacaatttttatatttcttaaagtgtaaaatctgctcctcktctggtgtttcctatatcagcttattataatattgatctcatgcttttacaagctaataccctctgtcttttttctcacatccaatagctgtccgtagctgactcccataaacccccatctcctacagaagtttcttctgtcccttctaagcatagcccctcatgtctggcctagcactttggaatagactctgaaattatttccatctcatctcttacaatacttgtcattttttaactcaaatgtgccttttcttaggaaagtgatgtgtcgtttcgcagttcctaaaaacgttgagaggttccttggacattgtatcctagacttggagaaggcaaagttgtggtatgataagccgaagctttctatattttatgaattttgccagatcttttcttttcccaaatcttgcccacatctgtctaccttcctttttttctagcattttaagtctttacaaaacattcaacttggtttttactgaaacattagtaactggctttcttttctcactcacaatgtcatcaatttatgtaatttaatataattatgcaattatataacaagcacagctggcatgaagaggtttgggaacaaaacaataactgttgacaggtatacaattcaactggygggagcagaaacgggcagacctactagataaagggtgcttaccacttgtgagcccccaacatgcctggggsatctgctgtcactgtgtgttacagagatggagactgtcagtcgctggtgtcagttaagagagcctctgttttattattattttgggttttttttgagatggagtctcactctgtcacccagtctggggtgcagtggtgcgatcttggctcactgcaacctccactttctgggttcaagcaattcttctgcctcagcctcctgagtagctgggattacaggtgtgcaccaccactcagatctaatttttaaaatatttttagtagagatgggtcttcatcatgttggccaggctgatctcgaactcctgacctcaggtgatctgcccaccttggcctcccaaagtgttgtgattacaggtgtgagccaccgtacccaaccacctctgttgtatgtaattagcatgttaattgtgataaattggggaaacagggaaaaatggaaatgagaaaataaatttatcgtaattctaaagcatgaggataacattttgcttctttttatcctgtcaacatttttatatctttaagatcatactcatgtataaacacttgtgtcctatatgttcccttaacattttaataggaacattttcccatattattaaacaccttataaacaattttagttgttgtatattcattcagtgattcgttgagttccttcaatgattttgccataagtcacattctcatgttgctataggcagatacatagtaggctgctttcaaatttttattataaacaatggtgtgatgaacattttttttttgagactgagtttcgctcttgttgcctaggctggagtgcaatggcacgatctcagctcacagcaaactctgcctcctgggttcaagagattgtcctgcctcagcctcccaagtagctgggattacaggtgcctgctaccaygcctggctaatttttgtatttttagtagtgacggggtttttccatgttggtcaggctggtctcaaactcccaacctcaggtgatctgcctgcctyggccccccaaagtgttgggattacaggcgtgagccaccgcgcacggccacgaacatctttatatatcagacaaaaatagtcctatgtggaacttttaggccaaaaggtacggccttttcaaggactttttattttgttgttttttacagataagtctcactccgttgcccaggctgtgatgcagtggtgtgatgactcgtagctcattgtaaccttgaactcaagcggcccttctgcctcagcttcctgagtagctgggactacaggtgcatgccactatgcctggctaattaaaacaattttttttttccgtagagatagggtcttgctatgttgcccaggttgttctcgaactcctgggctcaagtgctccccaagcattgggattacaggtgtgagccactacacttggccttaaaggacttttgatatattttgtcaaactgctttccattaagtttatactttcaccagcaatgtataaaatctttgtgtcaccttatcctctcccacagtgaatagatattataatttaaaaaccttgttaatttgatagattacaatcacaccctgttttagtttttattttcttgattggtaatgagatcgaatatttttccaaatrtcatttatttgcatttgcatttttgtaaaatttgaggtcctgtttatctgttaaaaaccatttatcagttgattaattcaattgttgatttgcatacatttttaatgtcrcgaaggaattatctttgtctttaatatttattacgaatatgctttccacagactcatttcttacctttcagtgttgatcaattttttggatgggatgggcagggcaggttttacatttttttatggagtatttaaacttacaaagttttctgtcattcagtgtctgaaaaaatattcagatttttttctggttttatttaaaaattaatttcaatttttttgcatgtaactttttttatacttgggaattgagtttctaacttgatcatttccacttgctttagatagttcaccaccattggttggataatgctgcctttccacctgatttgtaatcgtcttttattgggccctcaactgttacatgcacaaagaaggataattcttctgaggtgtctattctgtttcaacgttgtatctgtaccgaatcattgccgctttatgttaattataagatgatattggtccccccatttatcgtcttcccttctcttcccctcccctccccttttctttttctgtcttcccttctgcccttcctcttctttccttcttcccttcttcctccttccttccttctttctctttccctccctccctcccttcctccctttccttccttccttccttccttctttccttcctccctccctcccttcctccctcccttccttccttccttccttccttccttccttccttccttccttccttccttccttcctgttgctatgcctctttttggtcacaccttccatttattggaattcttactttcgttattctttcaaagatcagtaacattcctaaaggaaaggtaaataaataatgtattttcagagatcttgttttatatttttcctttgcctttatatatttggctaactatggaaggcctttgttagaatctttcccctgaatgctatgggcatttgatattgctgtgtatgaattgagttcatccatccatccatccatccatccatccattcatccatccatccagaatgagctacacaatatgtcgggtccaaagaaaaatgagaatgtgagctccttgctcaacaattattaataatttcaatatgataaacgaggttcattaaactaaaggcaggactcttctgaatatagggctccwtgtgactgcatgaagtcmcccgtgaagtcagccttgcatccatccatccattcatccatggatacccatcctgtggatgcttactgaacacccagtatgtgttgtgtgctttgagggaaagaaacctcagtctagtggaggacacagttagtgatgatgcaagtgtgcacaggatgcacagaggagagagaactccaccagacccagctgccagagacagctttctggaggaggtgatatttacactgatgtgtccaaagcttttgctctgattgatgtggagaggcttaggagggttttgaactcaaaaggagtgacatgctccaattcaagtgctttgtaasgatgactctactgcatggaagacgcactgtggaggacaagtgtagaagcagttaggaagctattgcaatgatccaggcaagggaagatggaaatggcaacttggatatgtttggaggtagtgagaagtggtcagatcctgaatatattttgaagaaagcactgttaagatgtgttgatgaaatggatatgaggtataagagaaagagagtagttaagaatgacttccagattttccaatctgatcaattagaaaaatgatgccattcactgagacagggaagacttgcaggggaacagtttgggagagatgaaacattcaattttggatgcactgtttctgatgcttattaaacaaccaagtggagatgttgtccagagagttggatgtactattctagatctaggtttggtttacatgggggaagagtagggagggaagaggctttgcctatgaggttgctacagaagagtagagaggaaagacctttttgataaaatgttcttggtgactgattggatgtgaagaataaggaagcagattcagaaaatgaaactgaccagtctttaaggccccttttccctaatcacgagccaaacagggggattggattttggagtcatagttacttcttttggaaagagcttgtcttggaaccgtttcttctagtttagattcctgtggcagatggtgaaagtaatttcttgatatttgtttgcgatgaagagagaatgtgctgtcaccgaaatgttgaattattaatgattgaggaggaaatgacttctttcagaaacaccaattctgaaggcctcttagatagaggccagatagtaaattacctctttcagtgacagaactaaagagttgatgcagatcgaaaagggatgtagtgattgccrtctgtgggtccggaatcaatgtaatatttatgggattcagcacattttagaatctcatctttgctcatagtatccattactgctattaccttttagtagctgttttacaagaatsagaaagtactgtagagactgtctgccatttatggaagaaggcygggtactctagaaccaatggatttagagtggaaacagagcatttctgttatcgaggaaagagctaaacgggtcccaggtcactctgatccaaccttgggagacagtgctgcctgtgtctggctatcttgtcctaggagtgttggtgaattatgcatggaaaaagtcatgtagttgtctggattagtcaattttcacactgctataaagatactacccgagactgcattatttataaagaaaggaggtttaattgactcacagttctgcatggctgggaggcctcaggaaacttacattcatggtggaagctgaaggggaagcaaggcacgtcttacatggaagcaggagacagagagaagcagggaagtgcctgacatttatcagacaaccagatcttgtgagaactcactcactatcatgagaacagcaagggagaagtccacccccatgatcgaatcacctcccactaggatcctccctcgactcgtggggatcacaatttgagatgagatttgggtggggacacagagccaaactatatcattgtcccctttcaaaattaagagaaatttttgcagagaagggaaatagtgaggaagtgcacttaagtgggwcttgcaacatgtggttctgtcttcaacacgaaattcaataagggggaagcgaccacagaaccaacacattttcaaacagtgtggtaacctggtgagtgtgtgtgtgtgcatgtgacaaggtacttattttatcctgctgtcagtcattcattcacttttaaagatgaggttatctaaagacgattgctgagctctgaaatgaattaaaacccgtcttatttccagccagtgatttaaatattgtatagctcatttataattgaataaaattgtggtggctctttgtggatttttgaagtcatcttctctaagaagcctgttttgttttctctttttgaaataaacatgaatttgcataagaagcaaggagtctctgaaagaaatcaataaaattaactggaatttgatttcacattttgaatgcattacatctttctattaggggagatataagagaagctgaggctcataaaaaagtgacctacttgaagaagatgaatatttaaaataagagctttaaaaataatttgcttcgcattggtggaccayagctcaaaataacagaaagcctaacagaaagacaggtttttcagggattgggaagggcagctggcactgtcttgagggcaatacttgaagtacccagggtggtttggagtctgaaaatccgagttcaagttctggcactgctacttagtttatttgagatatgtattagtctgttttcacactgccgataaagtcatacctgggactgggtaatttacaaaagaaagaagtttaatggactcatagttccacgtggctagggaggcctcacaaacatggcagaaggtgaaaggcacgtttcacatggcgrcagacaagagragagagaagagagtttgtgcagggagactcccctttataaaatcaccagatcttgtgagatttactcactgtcacgacaatagcaccggaaagatctgcccccatgattcagttatctcccaccgggtccctcatgggacacatgggaattatggaagctacaattcaagatgagttttgggtggggacacagccaaaccatgtcaagatacatgttttcgttttgacccttaaaacgattttcctttgtattgcaaatgaaatttgctttacttgacgttaatgttgaaattaaacctgtttaatttctataggtgcagaattgaaccgagactttaggagttcaggtcaagctagttccttaggtttgaagggctgagtaggtggagtatgtgactatgtaaataaacctccctgactgggtgaggcagcgccctctctggagtcagtgtgcaaggatgttagtgaaagctgctcttttttttttcctccttaaactctcttcacctcttgtttgcaagggccctctgtaaatgggtcatgtaccacgcaatgcataartattcagaaaggtgcttcctgcatgtccttctgaagagctgtgctttgcagagtttttgtgacttcatcgttcaaatgcaatgtgcacatctgttgatttttctttgcaaatggacgttggcgctcaatgtagagcagccttgtagcgctaaaggaaagttctctgttcagctaaatactgcgtgtgcttgggcaagtagttctgaatttcctcatgaataacatggagaaaatgcctatcagatttgttcagaaatccacctctctttattatttacttgggctttaagttttattttaaaagagttttattgaggtataattgacatactaaaaactgcacgtttaaagggtacaatttgataagctttgacatatgcatgcaccagtgaaatcatccgcatgatcaagatagtgacgcatccatcacccccaaaagactgtgcctcgactcatccgtcgtgtcttcctgtccctgccatccctctttactgaggcaaccactgatctgcctcctgcctctacagataagtttgcctctttctagagtttaacatacatggaataatatagcacatattcttttttgtctgacttctttcactctgcataattgcagtgtatccatcgtttatttacttttattactaactatattccattatatggctataccacagtttgtttacccattctcttgttgagggccatgtgtattgtctccagattgtagctatttccagtgaaactgtcatgtactaaataatctttgcatagatatatgctttttttttcccctaggtaaacacctagatacctaggagtggaatggctagatcttttagtaagtgtgtatttaactgttttttttaaaagacaaagttttgttatgtcactcaggctggagtacagtggcgtgaccatagctcactgcagctcaagtgatccttccacctcagcctccccagtagctgggactacagttacacacaaccatgcctggctaagtacttttttttttttttttttttttggagagacagggtctctctgtgttgcccaggctgttctcaaactcctggcctcaagtgattacctctccttggcttcccaaagtgctgggattacagacatgaaccactgtgcctggccttttcttacttttgaagaactgttttttccgttttatattcccaccagccatataggcaagttccagttcctccgaatccttgtctagacttttacattttagcattttaatgtgtgtagtgatagcactttgttcaaatttcatgtcccaggtgactaatgatgttgatcgtatttttatgtgtttatttgtcatttgtatagcttcttcaggaaatttccgttcaaatcattgcccattttctttttctagtttttctttttttgttactgagttttgagagttctttatgtattctaggaggaagtaccttatcagatagatgactcacaaatattttctcctaatgtgtgccttgtcttcttattctcttaatagtgcccttcagagagctcaagtgttaaatttttctattcattcttttatggatcatacttttggtatcatatctaaaaatctgtctaaaacgccttgtcatggaggtgttattttatgttttgttttattattttttttgagatggagtctcactcactgtgtcgctcaggctggagtgccgtggcgtgatcttggctcactgcaacctccacctcctgggttcaagcgattcttgtgcctcagcctccaaggaagttgggattacaggcgtgcgccacgatgctcagctaatttttgtttttccgtgttggccaggctggtcttgagctactgacctcaggggattcaccctttccggcctcctaaagtgatgggatttcaggcgtgagtcacctcacccggcttccttttataagtgttatagttttaggttttacatttataactgtgatctattttcgtatatgatgcaagctatggctcgaaatgtatttttaagtttttacatatagatatccagttgttccagcacaaatttcttgtgcctttgtcaaaaatttattgtccatgtatgtctaggtagggttttggactctgtattctgtccattgctgtgtttgtctgtatttgcagtgataccacactgccttgattagttttataagaagtcttgtaatcaggtaatgctggtcctccaactttgtattttaacattttctatatttgggccgggcgcggtggctcatgcctgtaatcccaccactttgggaggccgagatgggtggatcacgaggtcaggatttcaagaccaggctggccaacatggtgaagccccgtctctactaaaaatacaaaaattagctgggtgtggtggcgggcggctgtaaccccagctactcaggaggctgaggcaggagaatcttttgaaccccggaggcggatgttgcagtgaaccgagatcgcaccattgcactccagcctgggcaacagggtgagactctatatcaaaaaaaaaagaaaattctatatttaaggtgtaccgtaacatgacgtttttatatactcatatatagtgaattaaatatttaatactatagtcaagcaaattaacacatccatcagctcacatagttacgtgtatgtgtgtgtgtgtgtgtgtgtgtgtgtgtggtaagagcacctaaaatctactctcttagcaagtttcaaatatacagtattaataacttttttaaaaagttgttttgattgctttaggtcctttgcatttctgtgtgaattttgggaccagttaatttctgcaggtggggataaactctacctgtccatcttttaaatgtattgttgaatttgattgctgacattttgtttagaatgactgtgtctgtgtgtcctctggctggtagcgacagaggctgtccctggccctgtgagagtccaggcactgtcacctctaatcctttggggtgggtcctttctcccagcctggggtcttgtttttcgttctgatgatgtgatcagtatccagctcactgactgaatgggaaccactacagatctctggagttctccctctgtgcagctttctcctccaaactccttagtcctacagattctattaggttgttgcaaaagtaattacgatttttgcacccacctaatagctgcctcgatctccttgcaatcctcatctctatctgctcagctcagggagtccgccagcatcccccctaggctctcttttcctaccgtgcatcctgggaaccctctcaaggtagtggcctcacatcatttctttctgtctcttggggataactgtgctttgtggcctaatagccagtgtcttcagaagtgttcttttgagtattttgtctgttacttcagtggtttcagcgggaaaagccagtgtggtctctgtttctccgtcttggttcgatgtggaagtcacygaattgaatttttacataatgggtttttatatagtttgctgcactatatttatttatttgagacagggtctcacactgttgctcaggctagagtacagtggcgtgatcatggctcactgcagccttgacatcttgggctcaagtgatcctcccacctcagcctccagagtagctggaactacaggtgcatgccatcacgcctggctaattttgctattatttgtagagacggggtttcaccatgttgtccaggctggtctcaaactcctgggctcaagtgataagcccaccttggccttctgaagtgctgagattacaggcatgagccattgcccccagccttggtgtacttttagattggattgttgccctacactttttgtatgtgagtgcaagttgtgtcctaccagagtccctttcttagtattaaattgataacactttatcttaccttcatcatttttttttttttagatggggtcttgctatgctgtcaaggctggtctcaaactcctgggatcaagtgatcctytcacctcatcctccacatagctgggactacagatgccagccacygtgtctggatctattgtttgtctctgtcatttgactgtcttgtccttgaggattgtggctgagtcttatttacatcttgccttgatagtgaatgttgtgtaatgaatgaatgaatgaaagtgaatgaatattttcacttccataagaatatccaggatgctgtttttttcctcccccttcaaagatgtagatcgagaagggatatgttcagtttaaaagttgaagctttattttttattatttatttatttatttatttatttgagacagagtctcactctgtcacccaggctgtagagcagtggtgccatctcggctcaccgcaacctctgcctcccgggttcgagcgattctcctgcttcagcttcctgagtagctgtgattacaggcacatgcgatcacccctggctaatttttgtatttttagtagagacggggtttcactatgttggctaggctggttttgaactcctgacctcaggagatcctcccacctcggcctcccaaagtgctgggattacaggcatgagtcactgcacctggcctgaagctttatttaaaaagtagcttattttgaattttgagtgtgtgtgtacatgtgtgtttgtcctgataagggatgcttgatattttaacactggcaaagggatggctgattgggagttaaattgccccccaaataattcaaggtgtattatacatttctcccaaggagatacagatctggggtcatatgatttcgaactttgctttttaatgaaagttgattaaacaaatgccattttactttatagctattttaaataacctgtgctgtttagttcttttttttccctgtttttcatctttattgctaggtaggtcagaggcagaatttcccaaacatgtgattagtaggacacctctctgggaatttttttttcccttaaggtgacttaaaatgagtttgaggaagaaacaggacaagggtaaaaatttaaaagaagccgtatatctctgaataattcttttagaaagataatttaagtctcgttagaaatctttgatttccaattactcaaaagtggatgtgctcaatatcagtgttgttcagttttctgtgctttgtgaagttagctattatagaatgtaaaacgtaaaatgcttgggcatgttggcccacacctgtaatcccagtgctctgggaggccaaggygagggaattgcttgaggccaggagttcaagaccagcctgagcaacatagtgagacactcccccataaaaaaattaaaaataaaaattagccaggagtagctgttactggggacgatgaggcgggaagatggcttgagcctggcagttcagtgttgcagtsagctatgattgcaccactgcactctagcctgggcaacagagcaagaccctgtctccaaaaaccaaaacaaaacaaaagaagaatatgaaacgtaaaacaaatgtagacaaatgtgtatcccaccgtaatggaatttgttgtgtagtgccaaaggatttttatattctgaagtttctgtgctatttacttttgctttatttacagaagattctgggatgttgccaaggataactaggaattgcttgtaactatattggaaatacacacgatgaggttgaatgtggaaatgcagctgcatgtgttgtaaatcagtcctagagctgctgctgggcttggtgatagcttttctttaactaacttcggtgatcacatttgtaaagagatgggcaatatcatgaagaatggagggttacaaatttctgaacaacttgagtgaaagtttctagagtgttttccttgactatttttgactttccgtcgtttgagatttactttccagaaaggatgcaccctcccacccccagcccacctatccaatcttcaggattaattcttttcagctcttgggttacctgggggtggtaatgtgagagggattttatggaagggaattaaggaataggtggaagaaaaccacataggacagatgggaaacagaatatatgaagaatatgagaggagggcgaagaagtgagaaggagaagttaaggtgtgtgtgttcatcataactatggatgaggctgggtgcagtggctcacgcttgtaatcccagcactttgagaggccaaggtgggaggattgcttgagctcaggagttggagactagctggggcaacatagtgagaccccatctctacaaaaaatgaaccaggcatggtatgtgcacctgcggacccagctactcaggagactgagacaggaggwttgcttgagcccagaagttcaaggctgcagtgagttatgatctcaccaccactgtattgcagcccgggtgacagacactctgtcttaaaaaaaaaaagaaaaaaaaaaaagaactatggatgaagctagctagacttaggaacagactctaagaaccctgaaataaaccttttctgtctctaatgtgatctgtgatgtttggttatccccagagcaatggatagaggccatcacaactgctcagtccagaagacaccgtaaggaccactcctgtggagtgggagctaccagggcaagagtttatcaccaacagtgccttggacctaatagtaacttcataaatgtttactggatagrtataagtcccctagccttggaattgctctgaaacccaggatttcttaataaatgaagtaatctgataactgagataagcagttttgggtggctttgaaatgtcctcatactcctgtttgctttgaaatgggacttttgaaatgaggtgttgttctgtcccaaaggagagaagagagactgtggaagaactgatgacaggaacagcaaaactgagagaaggaaaatggggccaggagaggagcagatgctagaatggggtttgggytttcttggcactccaaagctcctgtatatttattgctatcctgattatgattgctcggttttaagaaggtagaagtcttttctggctgtaagcctacctgtctcaacacaatgtagctgctggacgctggccctggacactgacatgcctgttccaggagaacctggaggggtgttatatattgatttggttgtttctttgagtctcagatgcggaagtgcactggggaccctcagggaccgtcagggtttggcagaatggttctacatgtgcaccctggtatctccagccatgtcagtgtgaaygaagacagagattttgtactcttggggtcatagcgtgactggaggctgcatctcttgggctgtgcatattgtgataaggtgatgggtattgttgcttactgggaggagaaagtattagtttacttatgacttttaatattagtttartggtgatttctaatattactgtctttcttattaaaagcaagccactcaatggtcgggtgtggttcatgcctgtattcccagcactttgggaggctgaggcaggcagatcatttgaagtcaggaattcgagaccagcctggccaacatggcaaaaacccatctctactaaaaatacaaaaattagctgggcatggcggtgcacacttgtaatcccagctactcaggaggctgaggcaggaggatcgcttgaacctgggaggcggaggttgcagtgagctgrgattgygccactgcactccagcttgtgcgatagggcgagactctgtctcaaaaataaataaataaataaataataaatagaagtaagccactcaagctcagggtattttttttccctattttgttcacattatgtccttaatatcagagcagtacttggcacagagtaagcattcaataaatgcagttgaatgcatgagtctgttgaatatatgagtgcactgaatgggaggtcaggagagaaaactgggaagaggaggactaaatacacttgtgtctgaaccaacttcttctgtttccactgttttcttggaggcgactcaagagattcttcagttccctggcacagtgccaggcatggagttgacaaggacgggtaaagcccttgaggggctcatagacaggagagggtttgggatacgtaacccatagcctctcagagtgctactgtgggctctgctccaggtgcccggggagtcctggcagatctccagggtcagggaggcctcagaggaagggacatctgagctgagtgttgataccttcataggttagcggagaaagaagccggggggagttcctctaagcagaggccatgaccgcacattggcactggggtgtgagatgtcaggggtctgcacatggttaggccggcctggggctctggggacctgtggggaaggtggttctgacagcagaagccaaatgaagaagaggctggtgtgtgtctcacgtgtccgtgtgaagagaccactaaacaggctttgtgtgagcaacatggctgtttatttcatctgggtgcaggccggctgagtcccaaaagagagtcagcaaagcgtggtgggttatcattaattcttataggtttcgggatgggcggtggagttaggagcaatgttttgcgggcaggggatggatctcacaaagtacattctcaagggtggggagaattacaaagaaccttcttaagggtgggggagattacaaagtgcattgatcagttagggtggggcagaaacaaatcacaatggtggaatgtcatcagttaaggctattttcacttttgtggatcttcagttgcttcaggcgatctggatgtagacgtgtaggtcacaggggatatgatggcttagcgtgggctcagaggcctgacattgtgtcttgcttaggaatttgggtttctgtctttggggagcgatggaaggtttatttccacttttgaaaactttttaaatgaaaaatttcaaacatgcatacaagtaggaaggaccatattgatatcaatgagctcaacccctagattctacaattaatgttttgccatgtttgcttatccttctttctattctatctatatctatctatctatccatcagtctgtctgtccgtccattcatccatccatcagtctatctgtccatccattcttctttctttcttcctttcttcctttccatctatccatccgtctatctatccctccatccatccatccctccatcactgtctgtccacacttccatccatctgtccatccatcagtctatctgtctatccattcatctatctattatctatctgtctcaattatctatcatctgtccctatcatttatctatttgtctgtctttgtcatctacctatatctatttatttctatcatctgtcaatctgttatctattctctatctgtatcatctatctatcttatctatctatcatctatctgtctgtctatcaaatatcttatctactatctgtaagagtttatgcaggggagtgacttgtgtcttagagggtccctctgggaggaacatggaggatgaaataaagaaggaagggaatggagtttgggaagactcactgagagtctcttgaaattgttgggatgagaggcggtggtggcctgaactaaaatttggcaactgggctggagaatggagggctcagagatatttgtgggggtattctagtgattatgtctctgtaacagattgtccaaaaacttaataacttaaaataatgacaacaggctaggcatggtggtgcacgcctgtagtcccagctactcagaaggctaaggcaggaggaatgcttgagtccaggggttcaaggctgcaatgagccatgtttgtgccactaccctccagcctggacaacagagtgagacactatctcaaaaaaagagacaatgtttatttttcttacaaatcttcaatttggacagagcttggcaagatgactctgtttctggtctactggatatcacttgtaatggctcaaatgtggaggtctgtagtcatttgaagcctgtcactcccatctggctggttaatgctggctttcagcaaggatcttatttggagcacctacgtgtggcctcgacatgtggcctgggatccttcacaacatggtgtctggattatgagggygagtggggaggaggagagagagaatgagaacaccaagcagaacaatactgaattttaggatgtagcctctgaagtccccatataccgccgctgtcgccccgttctgttcatcaagccaggcacaagttcaggaggaggaaagattatctcctcctcttgacggggtgtggcaagatctcaaaatattgctgtggccatttttggaaaaccctgcccgtccaggggctaaagtggcaggatttaattgttggatgtgagcaatgagaaagagcaaaaaatctgasctgacactcagtttggattcgtgtctccayggcggggaggcattcacagagagggcagtgtgagtggcaggacaggaaargggaatgaggaggatggagttagatttggggtcccattgatttgttgggaaatactgcatcaggatgggttcatgaactacaaacccacagaggtagcttcttcttggaacagacaaccatgtttcctagtttttggacarctttgagccgaatagggtttgctagcctccctgggtccctataggaggctgttgtgtactctgaacctgagtggaggtggcaggtgtttgatgtgtccccaagcctgctggggataatgtggccttcagtatttgcttccctccgtggagctggagcagctagggaggatgcaacattcgttgatttcatctagcaggcatttatttgagcacttacggtatgctggaacctaaaagaatttgaatgtgcattaaatgccatgcctgccctaaagagctttgtctctagaagcggagaggatgcttgaggttgcatgctcatgctaagctgtgaatgtagttactaaaaggacagagcttcgagcaggggcagatgtaatatgcacttgctgggctttttccttgcctctgggttctccatggagtgcgctgttgctggtgtctcttctggagcatgtaggggcctgtcggagaksggggccaagctactgtcctcatatgttcgaggacatttacagacactgatctctcttggtatccaaatcaaactcagcattaacaggctagtttccctccctaacctccccttccaccttggggaataggacagagccatatgtccttgatcaatatctctgtctccagtcactcagggtcttagaaagcctgctccccgggaaccccatcccactctatccctcactcttcgcttcccatgtctggactctgatttagtaccattttccctgggtggtcctgatactcagtttatttgaaaaccrtggctgaaaatctgattccttgtagcttgtactcaaacaacaattcaagttagaaagcattgaaataccgagacagtttcagagaggctcaaggaagcccttctgcctggggagaagggggaaagtatcagggcattagagctgcactctgaatgttaggtagagttggacatacagagatgatggagatgatggaaaagacgttccagttagagggccagcatggaaaaaaagcaagggacatgacagagttgtttttttaaaattaattttaccaacgagttgctcatatgagcatgcatatagcttgtgtcacgttatttacttttatgtcttaaaattattttgttatttcagcctgcatatatgaagacatttacttttatcaagaaactggagtatagctatccaaaatcaatctagagactataatctatatatatttatgttaaaaggaaggtaggggttgcttgcctgatgatttaggtaaccttctaaatgtgtatatttttcctgtggccctgtctttaattcagagaccactgtatacattttatgtccattggtattcactccctcctgtatacctgagataccatctagagtcatttcctttctggctgaagaaattcctttagaattccttgtagtgtgggtctgcttataataaattctctaattttctttatttgaaaatgtttatgtttcattttcatttttgaagaaagttttgctatatacagaattctgggttgacagtttttaaaaattctccactttaaagatatcattctgtagtcttttggtctccatggcttctgataagttcattatcatttgtattattgttcccctgyatgtgatttgtcatttttttctggctgttttcaagattttaactttgtattttagcagttttcctagaggtagttttctttctatttatccctgcttgggttttggtgattttcttgaatctatatttttgtctttcactaaatctgtaagtyrtaggcctatttcttcacgtcttttctgccttattctctctctcctttcctctgagactctaaatataagtgtattgaatggactgatattgtcccacaggtctgggaggctctgttctattttttaagtctttttttcttcactgcttttcagattggatggtttctgttgatctgtcttgaagttcccagatgcttctgctatctttgatatgctgttaatctcattccagttagtgtatattttacttctagatgattctkttttcacagtttctgatttgggggttagattccccatctgttcattcattgtgtatatatttttcatttaaaattcttggacgtatgtataatagctgccttatagttcttatctactcatttcaacatctggatcatccttgggttgattttttttaaatgaattttttccttgagttcrgattatattttttcatttcatcacctgtctagtgatttttgatcaattcctggacactattaagtatatgttgtggagactctggatcctgctatattcctttcaatggatttttatctaacagagagttaacttggctgggctcaracttcaaacttgatcctttgggctagctaatgtgaaaggaaaataccctgggtccccaaaatccctaagggaaagggaaacgtcaagctgggaactgcttagagcaagcctgcctcccatttattcaaagtcacccctctgctcattgagataaatgcatatctgatcgcctcctttggaaaggtgaatcagaaactcaaaagaatgcaaccatttgtgtcttatctacctatgacctggtagcctcctccatgctttgagttgtcctgcctttccggacygaaccaatgttcatcttacatatgttgattgatrtctcatgtctccctaaaatgtataaaaccaaactgtgctctgaccaccttgggcacatgtcatcaggacctcctgaggctgtgtcacaggcatgcatcctcaactttggcagaataaactttctaaataaactgagacctgtctcaaatttttgaggttcacaccaggcagcagctgacatctccactctttctttcagcttccagctgctgctttttcaccatactcctgtggtttctcacatcctaggctcttggtgagccaaggatttgcatggatttcatacacagattttgtgggcttgcaccatctgcagaggcctgcctaccagggttccacctctgactttctggctgttcttctagcccccaagtttttttctgatacatcaagccagttacagttctggatctcaggcaaaagactgctacacactcagaaatcttaacttcctcagttgtctttcaaggatactcctgtctactttctgcctgcttttcatcactctctggacccttaaataagttcattaaagaaaatattttgttcaaatttgataattgttacttgcaggaggtttggtatatacaagctactctgacaatactggacaccagagccaaatatgagattttgttgtttaaatagctttattgaggtataattgatataaaaaactgtacttatttaaagcatacaatttgttgttttaatgtatgtttacaccttgaagcctttgctataatcaagacaacaatgagtattttttttcttactttttttttgagatggagtgtcgctctgtcgcccaggctggagtgtaatggtgtgatctcagctcagtgcaacctctgcctcccgggttcagtcgattctcctgcctcagcctccgtagtagctgggactactggtgcatgcygccacacctggctaattttttgtattttagtagagacggggtttcactcccacccaggctgttctcaaactcctgagctcaggaaatccaaggcctgactcagcctcccaaagtgctaggattacaggcgtgaaccaccgcacccagctaatgagtttttgagttttattaagaagtcacgtgcagatgaatggtgggaaagaaggctccttcacgttgacctcctgctttctatttcacagattgctctcaaatgcagtctctcattttgatcttcaagatgcccttgggaatgtggtcattcttaatatcacccttctgcagatgaaaaactgaggtggacgtattaaatggcttgcccttttcatgttaccttacaccactagacacctggggagatggatacgctgtcatccacagctttaggagttgtatttcagctgggagacaaaagttctcagagctggggcaaatcagtttggggtggagaagttcaagctcatgaaagctgagtgatggcatttggatggtgtgcatgagaagggaagggcttggggaagaacagaggccaagaactcagtttgggaagcaggtgtgacaagctaggtattatataatgtgatgaacacggtcattgtggaaatattaggttggtgcacaagtaattgcagttttgacaataaaagtcatggccaggccaggtgcggtggctcactcctgtaatcccggcactttgggaggccgaggcaggcggatcacttgaggccaggagttcgagaccagcctggccaatatggcaaaacctgtctctactaaaaacacaaaaaattaaccgagtgtggtggtggacacctatagtcccagctacttgggaggttgaggcaggagaatagcttgaacccaggaggcataggttacagtgagccgagatcacaccactacactccagcctgggcgacagagcaagactcgtcttaaaaaaaaaaaaaaagtaatggcttaaaaccgcaattatttgtgcaccaacctaatattaatagacaggaaaacagatactggagccctttcaaaagaggaactgagaggaaataggagtctggatataggacagaaaagaaaagggagggtcaagggtaacctttcttttcattcttgaccccagggcctttcactgatcctgatacatagtagtttgtaaatgttagctgaaacaaattagctggtgatgagaaggatgaaggggtgatatttgcttatggaccattaagttgacactacttgagtatgcatcagaatcaccttgatgggggctgggcacggtggctcatgcctgtaattctagcactttgggaggccaaggaaggaggatgactggaggccaggagttcaaaaccagccctaggtaacttagcaagatcccatccctataaaaaagtaaaaataaaaaaaattagccagacatggtggcacacacctatagtcccagctactcaggaggctgaggcaggaggatcgcttgaacccaggagttgaaggctacagtgatctgtgatggcaccattgcactccagcctgggtgacagaatgagaccctgactcttaaaaggaaaaaaaaaaggctggcgcggtggctcatgcctgtagtcccagcactttgggaggccaaggcgggcggatcaccggaggttgggcrttcaagaccagcctgaccaatatggagaaactccgtctctactaaaaatacaaaattagctgggcgtggtggcgcatgcctgtagtctcagctactcgggaggctgaggcagaagaatcacttgaaccccagaggaggaggttgcagtgagccaagatagcactattgcactccagcctgggcatcaagagcgaaactccatctaaaaaaaataaataaataagagagagaatcactagttggcactttgtgggtgctatctgagtttctggttcagtaagaggtggagacgtgagacatcaatcagtcatctcagacttccagtttccaggactgtgagaagaagatacatttatacatttctgttgttgcatcttgattaagagcaaacactgacatgtcctgtggacgctgctggcccagggctggacttggagatccagttgcacaaagtcatgagaacctttttgaattctgctgcttcacctttatgctccaggccgtgtaggagtatttttctcctagtcttgtctactggagctgacagttagagaggtgtccttgggatcattaatcagcatttaacatttgtargcaatctagtttattactttgcttaaactctggagctcagagtcttgtttctgaagtctctcaggtaacattttgagaacactgcatgttctgccacaaattcttcacaagcagacgaggaggctttccaaatgttacagcagatcttgtgtcctggggagggcagagctggccggctccagcagctgacagactggggaggacttctgggattacgttatgctcatttgctaacctgcaaaattatgactgcatgtatgatggggtagggcactctggtcatcttgcccatttgtcagagtcttcccaggctgctgtttggactcaaaagaaaagaatctttctctgttcatgaaccacttaaagttttcaggctttgcaagctggccctttggatgcagagggcaattgtttcttagaacagaccgtgtacatttcatgccagagcactgcagggctgcyggggcattgtggaccttgcggagttttgtgattctttgatgatttcatgacccagatgtgcagagtgaaaggggctttttcaatggagcatcagtacaaggcggaaactgtgccagagatgagagtgacccggttgcctttttttttcttaagtaatcgagcctagtgcttgggggcacattcactgtctagctgggcatttcacgatttcacccayctggtactaggcagctgatggctttgctgtcttcatacatttcttcccagtgtagctcttgaagacagaaggaatcactcctgagcagagcccactgatcttggcctggtgtgctatttggacacacaattgctgtcttcccccagttccttccactccattcaaaggctcccactctcgcatttttgaggtcaagggacttcctgggggtattgaattcctcccacgtcaaagagtgttcctgttaagatggttcccccaggtaagagttgattccagatattgctcgccaagaccctgaggtcagacgccttggagaattccccwtggagatcccccgagccagaaatccagtgtctgttccctttctgtaaaaaccaacacacattgcgcctgtaatcccagcactttggtaggccaagatgggtggatcacctgaggtcaggagttcaagaccagcctgggcaacatggtgaaacccccactgtacgaaaaataacaaaaattagctgggcgtgatggcgggtgcctgtaatcccagctacttgaggcaggagaatcgcgtgaacccggtaggcagaggttggagtgagccaagattgtgccattgcactccagcctgggcaacaagagcaagactccatctcaaaaaaaaaaaatcaacacacaaagcagcagcagggacaaccacatcttcactaagagctactgtgagttacagaccgaattgtctccccacaaattcatatgaagtcctaacctccagcacctccctcaaaatacaaccctattgggagatacggtcgttaacgaggtaattaaatgaaaatgaaggtgtccttataaaaagaggagattaggacacagacacacacagaagattatgaaaggcaatggaagaaggcggccatctacaaaccaagagagactgacctcaaaagaaatcaaccccgctgacaccttcatctcggacttccagtttccaggactgtgagaagatacatttctgttgttcaagccacacagctttgtgrcattactccacggcagccctagtggagtaatgcacagtgtcatggtgatggagtaacctaaatactccaaccactcgatgatttgatctctgctagcttgagtgctggggccaaattacactggcctctccagctctgctctcctgacctttctagaaagcttatcatcagagcccatctgctggctgatgtcttcaccaacacacactttactgcaggtaaatcctccccatcttgagctcaggcatctaagagccttatcctcttaagataggctctgtkgagttagaaactgccccgctgactgaaatcgccagctccctggcccagctcttagacttcccttcctctctcccaaggtgggaaatagcttgttacttggaatgggccgtgcactttttgcccttcttgggtttactgtatgacaggtattattaaagacccatgttacattagcccctgtgtaaccatacctgcaagtgctgtgtcagttgcattagctggaattctaaattgactgttagaacagcactaaaaataatgtggtaaatgatggagttttagggcagtgtataagacttctggatgtggaggcagcctgctgcacaagccctgtgagctgggggcattctctaacccaccctccctccctcccttcctcacttccttccttccttccttccttccttccttccttccttccttccttccttccttccttcttccttccctccctccctccttccttccttcctcttctcttcctccccctcctcctcctccttctgcttctttttctcctcctccttccttcttctcccttcttcctcccctgccctcgcctcccttcccctctcctcccctcccgtcccctccccttccttcctctctgtcccctccttcctctctctgtctctctctgtctgtctgtctctctctctttcttcagacagggtctctctctgcctcccaggctggagtacaatggtctcatcacggctcactgcagccttgacttctcgggctcaggtgatccccccacctcagcctcccaagtagctgggactacaggcacatgccaccatgccttgctaattttttttttatagagacaaggcctctgttggtcaggcaggtcttgaactcctgggtccaagaaatcctcctgccttggcctcccaaagtgctgcgattacaggcatgagcccccatacctgccccattctctaattttcgtttcttttcttttttttttttttttttgagacggagtctggctctgtcgcccaggctggagttggctcactgcaagctccgcctcctgggttcacgccattctcctgcctcagcctcccgagtagctgggactacaggtgcccaccaccacgcctagctaattttttgtatttttagtggagacggggtttcaccgtgttagccaggatggtctcaatctcctgacctcgtgatccgcccacctcggcctaccaaagtgctgggattacaggcgtgagccactgcgcccggcccccattctgtaattttctacaactccatttccctatctgcaaaatgcagctaataatcatagtcagtcgtagagtcattgtgaagtttagagagaaaatatatgaagcacaagctgtgtctcacacaacactcaggaaatgttggtaagctgttagtaaaggtcacagtaaagacctcccagatcattcaagattcctttatgccctctgaatcaacagagatgcattaaatcttggtggttaagatttgtataacagttgtaaattactccatttaggttttccaaaaatggtaatccatgtaaagaaactgtgtatgcaacccacatttttgaacaaggaggattctgctctttatgggtcttttagcccttaaattaatattttctggctaatttccttatattatttcaagccagaagctaaaattgcatccctctctactcccctttcccctttatcctctccaagaggagggggaactcttatctacttggttcagaagctaggaatcagatgaggccagtttatgggggtttggactgctgctactgaaaacttagtgtacaagagagtgtggtctctgcttcctctcacccctgccgcaggcctaagctgagcggggcctctgcctcctggggcaggcccaactgtcttactatctttgctcttctttggacacttcatggccttcaagtcctagctggagagtgtaagagcttacatttcaggcttggacttagcaggtgggagaggctcctagaagctgatcctgagtccctcctcccagatttcacttccagtttgccattgcccttcataagctgatcaactctggaggtgacagaaaggagggccaactggctcactattatgaaaactgtaaactcacttccctaacaaaggagtttatagctgttatttctgcagccagtaccaaaacgaaagcgagactttggcctgtacaaaccaactcagctatctggtcatgtacatccagactggtgctctactgggaaaatgaatattttccctaaggcgagaaaggctgggcctgctgtagcctggcaactccttctctgcagacagagcttgcgtttctctttatttttccttttacttccccaaggtaaacattcaagtagatggcttcccttactttcatctcccaggtcccttttcctgttttctctggattttgtatttaaaagcaaagcttaagtctctgacagatgcacccagctgcagtgtgagaaggcactcaaactgcaacaaagagaagaygactacaacttttagtagatacttaattttttgttgttttgtttttagagacaaggtgttgctctgtcacccaggctagagtgccgtggcaggatcataagtcactgcagcctcgaactcctgatccttctgcttcagcctcctgagtagctgggactacaggcacatgccaccatgcttggctaatttttctttctttttttttttttttgtagaggtgggcgtattgctgtgttgcccaggctggtctcaaattcctggcctcaagcgatcctccctctttaaaagtccagcctctttaaaactgtgaatgcaataagatctggcataaagactgagaaacttgagaggaaccggtggaaatttcttctgagttacgctcacttctctctgcttcgtttgttcgtatcattgttacttttgctcaccagtcatgtttttgaagtagccacaaaaataaatggtttcctaatattatttccacctcccccctcatccacttttcatcgtggaattcttttcagagtacactttgtgcttcaaaattcagaggtactgacgtgcacataggttgcagttgtcctggtctgtgtgggggaatggctgaggagggtgtttcctgttgaagacccaattactttttttagaaaaaaattttttatttccatagacttttggggaacaggtggtatttggttccatgagtaaattccttagtggtgatttgtgaaattttggcgcacctatcacccgagcagtatacactgcactcaatttgtagtcttcccaccctttccacctgagtctccaaagtccattgtatcattcttatgcctttgcagctgtagagcttagctcccacrtatgcgtgagaacatacaatgtttggtttttccattcctgagttacttcacttagaataatattatagtctccaatccctttcaagttgctgcgaatgccattaattcattcatttttatgactgagtagtattccatagtatatatataccacagtctctttatccattacccatgtgatgggcatttgggctgattctgtgtttttgcagttgcgaaatgtgctgccataaacgtgtgtgcaagtatctttttcgtataatgacttcttttcctctgggtagatgcccagtagtgggattgctggatcaaatggcagttctacttttagttctttaaggaatctccacacygttttccatggtggttgtatgattttacattttcaccagcagtgtagaagtgttaccttttcactgtaaccacgccagcatctattattttgttactttttttgattatggcgattcttgcgggagtcaggtggtatcacattgtggttttgatttgcattttcctgatcattagtgatgctgagcattttttcatatgtctgttggccatttgtatatcttcttttgagaattgcctattcatgtccttagcccactttttgatgggattgtttgcttttttcttgataatttgtttgagttcattgtagattctggatattaatcctttgtcggttgtgtagattgtgaagattttctcccagtctgagttgtctgtttactctgctgactgttacttttgctgtgcaaaagctctttagtttaattaagtcccacctatttatctttgttcttattgcatttgcttttgggttcccaagtcactttttgaaatatccccagcacagctttggatgtgtcactgggccactggacacaggcatatctcacaaaaaatagagtcggggagagtgagagaataggagagagcttttctggagaggcagcccagtttaaatgtgaaatacaccttggtatattgattgctgctctacagttcttgaagaagaaaaaatgaggtttcaaaacaagaaggaggggaagactagacaaaagagcttgttgctttttatggttaggctgtgttcccacccaagtctcatcttgaattgtagctcccataattcccatgtattgtgggatggactcagagataattgaatcatggggcagtgtcccccatactatcctcgtggtagtgaataaatctcatgagatctgatggttttataaggagtttccttttttcttggttctcattctttcttgcctgccgccatgtaagatgtgcctttcaccttctgccatgattgtgaagcctccccagccacatggaattgtgagtccattaaacctctttttctttataaattaccctgtctcgggtatgtgaaaatggaataatacattgcttcttggaagacagcttttccgggggtccttcagtcagaacttgttctgccaacagaggtggtgggggtggcatgtttgatgtgtaggcgtcagagggattgataagacctggtgactagctggtgtgcaggtctcagtctctggagagaaggggcagttggagggaggaaggcaggaatgatcttggctgggaggatgtgttgcagtggttggtgcagggaacaatcaaggctttgtgatcatggatgctgtgggtgtggttggaggaggtcctttaagggctgtcttcggtggaggtttgggagaagagttggcctggctacaactctgcttcaaccaaagcatctttagtttgagcttttaatatcttgggcctgtcctgcaggcttgtttgaacaaagactatacataaaataagcaagaaccatttcttttttttttttttttgagacagagtttcattcttgttgcccaggctggagtgcaatggcgtgatctcagctcactgcaacctctgcctcccgggttcaattgattatcctgcatcagcctcccgagtagctgggactacaggtgcctgccaccacgcctggctaatttttttgtacttttagtagaagcagggtttcactgtgttagccaggatggtctcgatcacctgaccttgtgatctgcccaccttggcctcccaaagtgctgggattacaggcatgagccatagcacctggctgcaagaaccatttcttctgaggaatccctagagacccggggcttggtctttaggaacagctgatctttaagaaaaaagttgcacaagatgggctttgatatagtttgaatatctattcttgccaaagtctgattttgaaatgtaataccaatgctggagttggggcctggagggagctgtttggatcatggtagcggatccctcatggcttggtgctgtcttcctgatagcaagtgagttcttgcaagatctggtcatttaaaagtatatggcacctcccccactgtctctcttgctcttgcttttgccatgtgaagtgcctgctcctgcttcaccttcatccatgattgaaagcttcctgaggctttaccagaagtcaggcagatgacagcactgtgcttcctgtatggcctccagaaatgtgagccaattcaatctcttttcttcataaattacccagtctcgrgtatttgtttatagcagtgcaagaatggtctaatacagatttgaacttgaattttaaaattaaaaaattttttgagacggggtcttgctttgtcacccaggctggagtgcagtggtgtgatcatggttctctgcagccttaaactcctgggctcaagtgatcctcccacctcagcctaccgagtatcagggactacaggtgtgcaccaccatgcccacctgtattttgtattttttgtagagacagggttcaccgtgttgcccaggctggtctcaaactcctgggctcaaaygatctrcctgccccagcctcccaaagtgctgggattttacaggcatgagccactgtgcctggcttgaacctgaattttaaatgctaagaatgcacagattccaaagacacaagatagggggcccggttcagaggtaagatcctgcccttgtgtttcttggaatttttttcattttttgggggttttaaaattgagatgtaatttacatacagagtgaaatccacagaccttaagtgtagtttgattcgttttgagaaacacatacatttatgtaacccacagtctaccaatacataatacaatttcatcatctcagaaattctcttgtatcgcttcctagtcagtcttccacattcaccagaaacaagcactattttgatatttttagccctagattagttttgcctgctctagaactttatggaaatgaaatcatgcatatatattcttttgtctctgtgttttgttttgtttttcactcagcattttttttttttgcatttttctcaagaggtctgcagtcttttaaaaaaagaagcggaaaataaatatggtagacttgccaggcaccagatctctgtagcaactactcaactctgctgttgcagcaggaaagcagtgtagacaatatgtaaataactgcatgtggctatgtttcaataaaactttatttacagaaaacagatggctggtttgcagggataattagctgaccccaatacatgttgtttatcaggagtttcgttgctttttattgctgcgtcgtcttctatgtgtggatctgtcacagtttatttatctgttttcctgttgatggacacccagaccatttcagtttttggctattatgaaaagagcaactgtgtctgcttttatataggacttttgtgtgcctrcattttcatttcttttatataagtacctacgagtggaattactatgtcataggatatgtattactcagggttctctagagggacagaactaataggatagatgtatatatgaaagggggcttataaggagaattgactcacaggatcgcaaggtgaagtcccatgataggccatctgctagttgaggagcaaggaagccagtattggctcattcccaaaaacctcaaaagtagagaagcagctgacagtgtatccttcagtctgtggccaaaggcccaagagcccctggcaaatcactggggtaagtccaagagtccaaaagccgaagaacttggaatctgatgttcgaggtcaggaagcatccagcacgagagaaagatgaaggccggaagactcagcaagtcagcctctcccaccttcttctgcctgtttcattctagccacactggcagctgatttgttggtgcccacccccattgagggtgggtctgtctctcccagtccactgactcaaatgttaatctcctttggcaacaccctcacagacacacccagggacaatactttgcatccttcaatccaattaagttgacactcaatactaaccatcacagggcaagtgtatatttaattcttttttttttttttggaggtggaktcttactctgtaacccaggctagaatgcagtgatgcaatctcagctcactgcagcctctgcctcccaggttcaagtgatcctcccgcctcagcctcccaagtagccgggattacaagtatgtgccactatgccyggctaatttttgtatttttaatagagttggggttttgccatgttggccaggctggtcttgaactcctgacctcatgtgagccacccaccttggcctcccaaagtgctggtattacaggcatgaaccactgcacccagccctatatttaactcttaactgccaaataaatttagaaaatcattgtaacatttttcacttttgcctgcaacatatgagagttccggtggtgcctcatccttgccaacatttggtgttgtcagtctttttcctgttagccatggtagtggctgtggagtggtagcccacatgcttccttgaatacttcttgactgatgtggttccgtcacatgtgttgcctttatttctgcggtacctggagaggtgatcctctgcgatcaacctctcaggcacttaatagcctctctttacacaggctctgcatgagtaagtggcatgtgtgcacccagagtctttgagagaatgcatcttggtctttaaccatcatctaccatttatttatttatttatttatttatttatttatttatttatttatttttgagacagggtcttgctctgttgcccaggctggagtgcagtggtgccatcattgctcactgcagccttgacctccygggctcaagctatcctcctacctgagcctcctgagcatctgggactacaggtgcacaccactatgcccagctaatttttaaattgttttgtagaggtggggtcttgctrtattgccctgtctgatctcaggctcctggcctcaagccatcttcctgccttggcctcccaaagtgctgggattacaggtgtaagccaccacacttgcccctcatctattgcaattgtccacatgcatcagattttacactgatacgcttttgtcttttttttttttttttttttggtgtaaacatctcctttcccggctttgactcggtggaggagagctgggagaaggtgtcagcagtgacatcatttctggttttacaaatgccagggtccttcctccttcagagcctggagacaaagctgggccccatttatcacaacacccggccaactccttcctgccatatggctgattctctcctggggggaagattgagaaaatagacccatatgctactgtgattctgtttgtgtttggatgtggagtttaatttgtgtcagaaaatagcagtattcttatttcattgatttcctttttgcttcttttataaaaggaaagaatgaaagctggggaattagctacagaaatagcaagtgaataataaaataatgtgttgtggtccacgtgcagttaaaaacgggaatgatgttttactctctttcggggcgtattgacaaagagctatactggtttcttgtatcgatgtgatattttagaggtatcaagcattcttgtattcactgtcttatccagttataaaagtaaccttgtgaagtaggtggtctctaaccaatcatctgctttatttatttatttatttttgagacagggtcttgttctgtcacccaggctggagtgcaatgatgcaatcagaggtcactgcagccttgacctcctgggctcaaacgatcctcccacctcagcctcctgagtagctgggactacaggtacacaccatcatgcaccaccatatcaagcagatatgatgtccrtgtcataaatgaggaatttgacactcacagaggtttaggaacttgccccaggccactgagcttrgactgtggtcctcatcgaatagttatttgaaattcttaatgtcttggtttgtcaccaggyatttcactgcacacatttttttccctacctgggaaaagggtatatgggatcttaagaaaagggtaggggagttagagcatcatggtcaaataatgctgttccctggcagatacagtattggaactggaggagggagaaggaataggtaggtttttgggaagataactttatatagagattcacccatgcaacgagacagagcctgacacttgtgttggtgctgatgagtgaggacatggggtcagcagggtgacagcctgggccctgagcacctgtgtgtccctggctaagccactcaatccctctgtacctcagtttctcatctgcaaaattgggttcttggatatgatcttctttctcccttccagctccaaactttatttattaccaaaagcaacttcagtttttcccctttggttactccctttaattaaagcatgctaccttggtggagttacatcagagcccttcagcatcacggtgctgtctcagatttgtacagccctgttggagcaaagtctttaaggaaatggggggactgccccggtgtctggaggcaccatctgaccacagcttctcatcattgcactcatctttaggttcttggatgtaagttgatgtagaaatacgtctgcctagcacctagctttggccaggggttgatggcataaatggggaggcaatagtagctaatatgtatatgcatgtatattctgtgtctgccacctgctgataactttacagacattaccttcttatatcctcaaaacaactctaaagagtgagtagaatgattaaccccattttatggatgaagcttcctactgaagctgttgtctaattctggagactgtgattttatttatttatttttttcagatgaagcctctctctgttgcccacgctggagtgcattggcatgatcataacttagtgccacctcgacctcctggcctcaggagatctttccgcctcagtctcctatagctgggaccacaggcacgtgccaccatgcttggctaatattttcaatttttttgtagagatggggtctcacttgttcacctaggttggagtgcagtggcatgatcataacttactgctgcctcagcctcctgggctcaggagatcctcctacctgagtctcctatagctgggaccacaggcatctgccaccatgcttggctaatattttaattttttttgtagagttgggatctcactctgtcacccagactggagttcagtgttgcaatcatggcttactgcaccctcggactcctgggctccagtgaccctctctcctcagcctcctaagtagctgggactacaggcacatgccaccatgcttggctaatttttaaatttttttgtagagatagagtcttgctgtgttgcccaggctcatctggaactcctaagctcaagcaatcctcccacctcatcctctcaaagcgctggggttacaggcacccagccgagcctatcatcttaaccattatttcatgagtagccatagattaatacaaatctataagccaatgtttcttgacacttatgaccagcccccartaaaaatcttgcatactaactccctaatgagcttctctaatgggaaactcttctcatgtgttgtcagaactccttactggagggattagcagcatcccctgtgacttcactggggtagaactcttggaagcttgcacgcagtctcctccagacctcctcccrtgtgcctgttccctctcttgctgctttttatttttatttattttattatttatttatttatttttgagacagggtcttgctctgtcgcctaggctggagtgcagtggcaggatcttggctccctgcaaactccgcctccaggttcaagcaattcccctgcctcagcctctcaagtagctggggttacaggcacctgccaccatgcctgggtaatttttttgtatttttagtagagatgggacttcatcatgttgaccatggtggtcttgaactcctgacctcaggtgatccacccgcctcagcctcccaaagtgttgggattataagcgtgagccaccgcgcctggccccttcttctgcttctgttttgaatcctccactgtaataaatcagagccacgagtacaatgtgctgagtcctatgtctcctcctactgaattattgacctgggggtggtcttggggactcccagaatacctgagttgaaagcttggttatgctacttgatagtgtgtggctttgagactgttgcttaattaaaaaaaaaattattattatttatttttgagacggagtcttgctctgtcgcccaggttggagtgcagtggcgtgatcttggttcaagtgatcttggttcactgcaacctctgcttcccaggctcaagcgattctcctgcctcagcctcctgagtagctgggactacaggtgcgcgcaatgatgcctggctaatttttatatttttagtagagacggggtttcaccatgttggccaggctggtctcaaactcctgacctcaagtgatctgccttccttggcctcccaaagtgctgggattacaggtgtgagccactatgccccgccaattttttttwaaaaaatttatttttaatttttgtggatacgtagtaggtgtatatgtttatagagtacatgagatactttgattcagacatgcagtgtgtaacaatcacatcatggaaaatggggtatccatcctctcgagcatttatcctttgtgctacaaataatccagtcatactcttttagttattttaaaatgtgcaacaattacattattgattatagtcaccctgttgtgcttttttttttttttttttttttttgagacagagtgtcgctctttcgcccaagctggagtgcagtggcgcgatctccgctcactgcaaactccgcctcctggtttcacgccattcgcctgccwcagcctcctgagtagctgggactacaggcacctgccaccacggccggctaatttttttttttttttgcatttttagtggagacggggtttcaccgtgttagccagggaggtctcgatctcctgaccttgtgatccgcccatctcrgcctcccaaagtgctgggattacaggcatgagacaccgcgcctggccctgttgtacatttaagtagtaggtcttattcattttatctaattatatttttgtacccattaacagtccccactttcctccactcccccactccccttcccagcctctggtaaccatccttttgctctctatctccatgagttcaactgtttcaatttttagcctccacaaataagggagagtcagcaatgattatctttctgtgcctggcttatttcacttaacataatatcctccagttttatccatgttgttgcaaatgacagggtcttatttctttttagggctgaatagtactctactgtgtatatgtatcaagattttctttattcattcatctgttgatggatgattatgttgctttcaaatttctttatttattgtaatcttctgtaaaaaggggatgcaggccaggcacggtgactcatgcctgtaatcccagcactttgggaggccsaggtgggcggatcaccagaggttgggagttcgagaccagcctggccaacayggtgaaactgtctctactcaaattacaaaaaaattagctggatgtggtggcgggctcctgtaatcccagctactcgggaggctgaggcaggagaatcgcttraacccaggaggcggaggttgcagtgagttgagattgtgacattgcactccagcctgggtgaccgagcgagactctgtctcaaaaaaaaaaaaaaaaaaaggatgcaaataccaacttcaagtgggtatggtgtgggttaaattagaaatatgcacatagtggcccccaacaaatgttggttcttttctgctctcccatccaaaagcaataactaaccgaaatgggtgtagtgagtatttgggcattgctgcagtaacagaaagaccttcagtttcttggcatcatttccttcattyattgagttatgttccatgctctttgctgacctggactctacttactaaacatggtccttcgctagagagatcgagaagaagccaaaaagtctttgagcttccaggattttctctggagacagctaacctggactaccagtaagtggccaacaccagctgacactagctgacgctagttggactgacaccaacacagacctgtaagaatgaagaacctcctaattaacgacgctatagcttgggaagataggtacttaagattgacaagccattttagtcttggtttctgcaggtggtgtggcygaacattcagaatcaaagcaattttcacttcatttcatccagaaggtctctatgttttcttataaagagactgtattttgctcctctctctccccacaaaaagaaatctggtcaaaactaagcacattcccttcgtttatgtgttggctgccgtggttcataaactttagtaggtttcagaatcacatggagagcttgttgaaacatgaaatgctggcacgatcctcagaatttctgattccttaggtcttggcggggcttgagattttgcctttctaaactgttcccagttcatgttgatactgttagtcctggataatactttgagaacctctatgtggccgcggcctctatcagagcataaccgggccgtggctgagatacatctgtcttatctgtcaagaatgactcatttaagcacttcactgcgctgcatgtcctttgattaggtggccaagggggtggctaaagctgaatttacaaggcaaggagccctgaaattcttctttgaaagatctcgcaaatgatctatttatttttcatgggatgattttccagatctttggtttgctttcctgtttggcttgtgttagaacactactgttcctaaagttgtaatttttgtaacccattggcatatgtaagtggtttacacaggttcttgtggattaggatttctaaccgtccatcatctgtctgtccactggcccactcacctactcatccattcatccatctgtttacccttaccctctctgtcccactcatccatccacacacacatccatccactaaccccatccattcatccatccatccatccatccatccatccatccatccatccatcctgcctacccttcygctcatyaatccattcatctgctcacctgatccacccgcccacccactcaccccatccaccgacccacccatccatctgtccatccttccacccatccatccatccatccatccatccatccayccatgtatgtgtccacccacccacccatgcacttatccattagctcactccatccatccatccacccactcatctatccatatgtatattcatccatcatccatccatccatccaacataacacacttgtagactatagagatataaagaaaaataagaccatgtcgccatcctcaaggggtttatggtactgtaatagaasctcctcttttttgtcttccttacagaaaagtgtgcatttcttgctttctagtgagttgagataatagttaaatccattagattaatattgacctttcttgtaaacacacatctcctcagaaaatgttttgagaaatctgctgacttcttgaagtaaaggcacaaatgtctttaacccagtaagtaccttttgttgaaaatcaattccttccaaggaagcttttcatagcctcttggtggtgatgacaagaaggtttcctctgaataagtatggtatgttttagaaagttctgccacgttatcatgttggcttgaaagccccatgtctttatcagtaagtctggcccgtggcttcgtgcaagatgtttgtagatggtgtgtttgtattgatggagcatctgcyctgggtcagcctgcactgcatgctcaaccattagagagcacccatgtaaataattctagaccaccttccttgggatcctttgaccagacacattttggcatttactactaggtgcagtaataatccaggtgactgcatgtccactggtgtaaatggttttaatggttcctagaggctggattttaagtgttaaaatcactctctgtgtcccttcatcctgcaaaagtgttcaaaaacttgagttataaacttttcttaaaatacctgaattattttcatctctccttatcctagttccatctttatttaaacacatggagctttttgcgtggttatagtcattatggatattcagtttttttctgcttttctcacattacattatttagtaaatrttctttcctgctcctacatagctatgataactctataatagtgcacagtttaatgtacctttattgcttttccattttctatcacttagttattagktcgtttctatttttttaaaaataatgaatgtttctatacctagcatctagactcagaaaacaaaacaaaactcaactcttttttccttctttaaaataattacttacgtacatttatatgatgttatttatatgtattattattctgattatatttttaaacactcttgatatagttagtcagactttcttcccaaagaattcaggcaattcagttatctctctgccaaaattgggcttaatggtttttctttgtttttctaattttaattttaaagagtgtgcccactgttttgatttgcatttctttaattactgacatcattaaatccrttttcagtaattggcttattaaaggagttctgtttatgtgttcgtgtatgtgcaggaaactggtaccatattttttctttgtatgggggtgtgtgtgtttatttttatatatatatatataatttgtgtgtgcatgcgtgtatggcttaatactatacatgtgtggattttccagtyatattggctttcttttcatgtgtttttttctggcctcataatactgatgcctgctgagaactcagatatttattgagtgaatgaatgtttatctttgctctgattctcttctgttatacacattcaaaactcttacacgggaggacaatgttgtttgttttattccaggttttcttatttgatttgtgatatttagcttattttttggccacaaaatttagattggatacggatctaagtttgtttttctccattttttttggtttgatttctgtcctaatgcatgaaattatactttattttactttgccagtttttttttttttttagttttttgagatggagtctcgctctgtcaccaggctggagtgcaaatggcatgctttcggctcactgcaacctccgcctcccgggttcaagcaattcgcctccctcacccttccgagtcgctgggattacaggcacacgccaccacacccagctaatttttgttatttttagtagagacggggtttcaccatgttggccaggctggtctcaatttcttgacctcaggtgatccacccgcctctgcctcccagagtgctgggattacaggcgtgagccactgcgcctggcctactttggcagttaaattctttaaacatttgggatctatgtctgggatgcctcttctttctcagtgatctgtgacttggttttaaggtattttttactccttatgacatgtttgtttcaaacatattataatgttcaatgaagaaaatcctcttttattcattcctttcccccaaatagtatttttttctctcrtttttttctgttttaaattgcattttacataaaacaatataaataagcaatgaaaagttttccagggcaaaaggagcataaagtgcagacctttattctgtagcttcagtgaagtataattagataaattttaattaaattaaaataattmatcacacagacaatattataacaggagtagagaaaagaaagtgaaactttcacccacagtcatccataacagttttttcaagtgtacacatttctgtttaaaggtatrtgaagtctgcattgttttaattctagcttagctttagttgcatatttgcaatttttcatttaactttatgtcacaaagattttttccatattagtatttttcttttttaaaatgtagttgaatcaaacatttaattaagtaatgattgtatatmtttattaggtacactgtaatgttttaatatctatatacatgatggaacaattaaatccatctaattaacatgtccatcattgcacatacttatctatggtgagaacatttaaaacctactctcttagcaattttcaaatatgtgatactttattaataactgtagtcaccgtgctgtgatatttycaaaacttatccctcccgtcaaaccgaacctttgtaacaaaaccccacggccactgccaccagcctttggtaaacaccattctattctctgcttctataagtttgacttttttagattccacatataagtgagattacgcagtatttgactttctgtacctactgttttcacttagattaatgtcctccaggttcattcacgttgttgcaaatgacaggatttccttctttataaaggctgaatagtgggtatatgtatacacacgtgcacacacacacacacatacatacacacacacaccattttctttatccatcatccattgatggacacttaggttgattctgtgtcttggctattgtgagtagggctgcaatgaacatgagagtgctgatatcttttcaacatactaagttcagttccaatggatatgtacycagacgtgggattgctggatcatatggtggttccatttttaattttttgaggagcctccatactgttttccatagtggctgtattaattttccatttccaccaacagcataccagggttcctttttctccacatccaacacttatctttcgtctttttgaaaacagccattctaatggatgtgaggtaaaatctcattgtgttttcaatttgcatttccctgatgattaatgttattggacattttttaatatacttgttggccatttgtatctcttcttttgagaaatatctattcagattctttgtccatttttaaaattaggtcatttatttctttgctcttgagctgttcaagttccttataaattttggatattaaccccttgtcaggggcatggtgtattaggctgttcacacatggctataaagaaatacctgagactgggtaatttttaataaaagagatttaattggctcatggttctgcaggctttgcaggaagtatagtgctggcatctgctcagattcgagggaggcctcaggaagctttataatcatggcagaaggcgaagggggagctggcacgtcacatggcagaaggaggagcaaatgagagagtgggtcaggaggtaccacacacttttaagtgacaaatatccagactgtgtcatatttttcaaattattttctccccgtccatgggttgtctcttcactctgttgattgtttactttgctgtacagaagccttttagtttgatgcagtctcatttgttgatttttgcttttgttgtctgtgcttttggattcatattcaaaaaagtcattgtccagaccaatgtcatgttttgttctagtagtttaaaagttccaggtattctgttcaagtgtttaatccattttgagttgattttagtatatgatgtgagaaaaggatccgacttcattctgcttgtggatatccagttttctcaacaccatttattagagactgtcccttattcattgtgtgttcttggcacctctgttgtaaatgcattractgttaatgtgtgtgtttattactgagctctctgttctgttccactggttgatgtctgtttttatgccagtaccatgctgttttgattactatatctttgtactatattttgaaatcaggtagtgtgatgcctccagctttgttttgtttgcacgagattgtttggatatttgagtctttagtgcttctatgcaagttttaggatcaatttttcttttatttttgtaaaaatgtcattggaatttgatagggattgcattgaatctgtagattgctttgggtggtatggacactttaacaatattaattctttcaatttttgaacatggagtatcttttctcttctcttctcttttttctttttctttttttttttttgagacagagtctcaccctgttgcccagactggagtgcagtggcacaatatcagctcactgcaacctccgcctcctgggttcaagtgattctcctgcctcagccacctgagtacctgaaactaccggcatgcaccaccatacctgcctactttgttttttttgtttttgtttttgttttttgaaacagagtctcaccctgtcacccaggctggagtacagtggcacgatcttggctcactgtaacctctgcctcctgggttcaagcaattctcgtgcctcagcctctcaagtagctgggattataggtgcctgccaccatgcctggtaaatttttgtatttttagtagagacggggtttcaccatgttggccagcctggtctcgaactcctgacctcaagtaatccacctgtcttggccacccaaaatgctgggattacatcttttcatttacttgtgtcttctttaatttatcttgtcaatgttttattatcagtgtacagatcttttgttttcttggttaaatttattcctaagaattttattttattttttattttttactttttacttttttttttttttttttttgagacagagtctcgctctgttgccaggctggagtgcagtggcgtgatctttgctcattgcaacccccacctcccaggttcaagcgattctcctgcctcagcctcctgagtagctgagactacaggtgggcaccaccatacccagctaatttttgtatttttggtagagacagcattccaccatgttggccaggatgatctcaatctcttgacctcgtgatccgcctgcctcggcctcccaaagtgctgggattacagacatgagccaccgtgcccggccactttttacttttttcaagagacaggtctcagtgcagtaatgctcattgcagcctcgaactcctgggctcaagccatccttccatcacagccactctagtagctgggagtacaggcacgctccaccacacgcttgactaatttttaaattttgtgtagagatggggtcttgttatgttgcctaggctggttttgaatttttttgatgctactgtaaatgagattgttttcttgattactttttcagagaattcattgttagtgtatagaaatgctgaattcagtagagtttcaggatattattgcatcaaaacacaggatttctgcatattattatgatttaagtgattattgttttacatgactctttcattgagttaggatttaataattctcctaagcagttcctttgattaaataagtaggttatttctaacaatttgctatgatagattatacagtaacaaactttgcagtgcagatggctgctttttgttgagaatgatttctttttgatatgacactgagccactgcatgtagtcatatgggtatttatacaaattaccaaattgctttgccagctagagaawatatatatatatatatttgacatgtctctttgtcaaatatatgaggtgtgtgtgttcatgtgtgtgtatacatatgaggtgtgtgtttgtgtgtgtatatatatatgaatatatatataaaatatatatatttatatataaacacacacaccaagtggttatcttgtgctcatgaatttgtactcataaattcagctctgtgtgtgcagtctgctcagcagcacctgggcagggcacttaacccggtctagatctcccaccttccccagtccatggaccctttctgacagcagtggtgatgaattgaccatgtgagccacgagaacagaatagtgtcatgattcatgatctcccctgacttggccagaggcagcgggagaagcagcagtgctcagagctctcttgagagtggaggcctgtgttcatcattttgtaaataagtcacatgctaccccgttgtaatactactttttaagataaaaacccacttcccaaattgctttccagagatttcctcaaggtagtgatgatcctaattattaattacttgatttgcaggcttttcccaatatgattatatttctgtaaggtgtaggggaagttttattgtcagggcgaccaagacggtgggtttctagtgcagttttgatgaagacctctacttgatcagggtctcatatttctgcggctaaaggaatgcagaccatatctggattctcctgttttctctgtcttgcactgtctgcacgaggtaccccttttctagtcaagactgatcagtaggccgggcgtggtggctcaagcctgtaatcccagcactttgggaggccaagacgggcggatcacgaggtcaggagatcgagaccatcctggctaatgcagtgaaaccccgtctttactaaaaatacaaaaaaaatagctgggcgtggtggtaagtgcctgtagtcccagctacttgacaggctgaggcaggagaatggtgtgaacccgggaggtggagcttgcagtgagccaagatcgtgccactgcactccagcctgggcgacagagcgagactctgtctcaaagaaaaaaaaaaaagaccratcagtagcagaatcaaccagcctcactttttgctttttcttctcatcagagagagagccctttcctgaattttgccattgatcaattgtgttgtgttgttaagtaagccacgtatgtttatattttaatgtgctctcaatggccttctcatctttgacttgtaagtttaaaccatgtcccttcgttgtcctaccttatctttggttttattttattttggatgttatttattattattgcattaccacccacttctctcctttctgcccccatgtccttatcttctgttatgtggagctggataatttagtttagctttgtcttttatagtgatgtgggaggaagataccgtatttcattcttcttctgctatgcagtaccagctaaaatgacttaatcagcaaagtggagggtaaggatgatagatgctggctcgggtgggttggggtagggaggtagggtacacgtcatgccacgtggactgcctgagcaagggcttctggaggcaaaacacaacattccaccatgggtaagtgtcactcgcacctggaatttgggagggcatagtgagaaatgagctgacacccactcactggtccttgggagccttrtgtgcccatttatgagtgtagacttgatcttgaagacacctggagctcaaacacgagcatctgtctgaaatggagttcgttgaaggtggttttgtgggcattatatttgttttgggatttgtcatgggtacaacatttagagccactgatgtatacaagcaatgaggtggacatgtgcctgtaattttttttcttttttcttttttytttttttgagacagggtcttgctctgttgcccaggctggagtgcagtggcacgatcatggctcactgcaacctygacccccctgggcgcaagtgatcctcccacctcggcctcccaagtagctggggctacagtcatgccacaaccatgactggctgatttttgtattttttgaagagatgggttttcttcatgttgcctaggctggtcttgaacttctggacttaagcgatctgcctggcttggccttccaaattgctgggattacagtcatgagccagcacgcctggcccattgctataatttggaattaaatgtggtgtttctcaaaacacaacagatgcctgctcccacagggagattgataaaagggagaaggagcctcccattcacagattactgtaaccaaaagtctcagccagacctactcagtgcagacaaataccctcccagaaacatttatggcatagcctttatattgtatttgttttaatttaataaatgctttttttttttttttttttgagataggatctctctctgttgcccaggctggtgtgcagtggtgtgatcatagctcactgcagtcttgacctcctgggctcaaatgatcctcctgtctcagcctccagggtagctgggactacaggtgtgtgccatcatgcccagccaatttttcgtatttttggtagagatgagatcttactatgttgtcgaggctggtcttgatctcctggactcaggctgtcttcccatcttgacctcccaaagtgctgggactacaggcgagagccactacacctggccacgagtgcttctaaaatcatataatgtattaatattttaatttttttcttataagatgtttctgtatttttatgatatgatatgggcttccaggaatggaatctccacttacaacattacactcggaggaaacaaagaattgatttataattacttgatttgctacctttrtccagtaattgattaggttaggggttggcagacttctcctgaaacaggctggagagtaagtattttcagctctgtgggccatatggtctctgtcataactacgcaactgtgccactgcagcgtgaaagcaggcatagacacctcataaacaaatgagtgtggctgtgttccaacyaaactttatttttggagagtaacatttgaattttatgtaatttccatgtgttgcaaaatatcattcttctctgaatgtttttcaatcctttacaaatgcaaaaccattcttcacttgagggcctttcaaaaacaaggcagtgggcaagatttggaccacggtttagcagtctcttcctcaggtcacartttagggttgtagagctgtgatttacttagcaaattctatgtgctgggtactgggctttatcttttcatatataggctcacataatcttcacaaaaactcttaattatgtatttatttgtttatctacaagggggaactggggcttcttgaagttaactcacttgcccaaggttatattttagttatgtaatagtggtggcatgacactttattttttattttatttttttgagacagggttttgctgtgtcacccaggctagactgcattgtgatcatggctcactgcagcctccaactcccaggctcaarcgattctcccacctcagcctcccaagtatctgggactgcaggtgtgcatcaccatgcctggttaatttttctattttttgtagagtcagcgttttgccatattgcctatattagtccgttttcatgctgctgataaggacatacccgagactgggaagaaaaagaggtttaatcagacttaacagttccacatatctggagaggcctcagaatcatggcaggaggcaaaaggcacttcttacatggcagcagcaagagaaaatgaggaagaagctaaagtggaaactcctgatcaacccatcagatgttgtgatatttatttatttatttatttatttattttgggacagagtttcgctctgtcaccgaggctggagtgcagtggcacaaactgagctcactgcaacctctgcctcctgggttcaagcaattctcctgcctcagcctcctgagtagctgggattataggcacctgccaccatgcctggctaatttttgtagttttagtagagatggggtttcaccatgttagccaggctggtcttgaactcctgaccttaggtgatccacctgcttcagcctcccaaagtttgagacttattcactatcacaagaatagcatgggaaagactggcccccatgattcaattatctccccctgggtccgtttcacaacacgtgggaattctgggagatgcaattcaagttgagatttgggtggggatgcagccaaaccggatcattgcccaagttggttttggactcctgagctcaggtgattctcctgcctcggcctcccaaagtgccaggattacaggcatgagtcaccactcctggccgagtgacaatttgaactgaagtctgcctgagtttaattttaactataaaggccctgttcttgtggagtttgcagagttgtggtgaagagagtgggtaataaagcagttttgcaattgttagtagaatattataatttaactaataagtaactctcttagatacaccatattggtaaagcctagaatgaggttggcttttggattgttcatcacttttagtgacagtgcagtggacaggagaggttgtttgggtttgaatctcactccaccccatggaagttcagtgaccttcaagttatttgtcctccctatgcctcactttcctcatgtgtgaagtagaagcagaaagagcgtttgcttaggagcattgttaccaagattatatgagawgggagactgcaggtgatggacatgtagtacattgtcaacagacatgagctcttattgtcrctattttttaagagtcaaataaaccccacyggctatatttaagactcacagtgctgctaaatttttttctcccctgctctgtatttccaaaaatatttttggaaaaaagattcagtcttatcaattacattgttcagatcaatgtctttgctttttactaaaccatattactaaattctagtgacctgattttatggtataccaccacaacagagattctatcaagttctctttaycttggtgatatggtttggctgtgtccccatccaaatctcaacttgaattgtagctcccagaatttccacgtgttgtgggagggacccagggggaggtagttgaatcatgggggctggtttttcccatgctgttctcatgatagtgaataagtctcacgagatctgatgggtttatcaggggtttccgcttttgcttcttcatcgtttttctcttgctgctgccatgtaagatgcggcatgtgccttttacctccccacatgattctgaggcttccccagccatgtggaactgtaagtccagttaaacctcattttcttcctagtcttgggtatgtctttatcagcagcatgaaaacagacgaatacagttaattggtactagcagagtggggtgttgctgaaaagatacccaaaaatgtggaagcagctttggaattgggtaacagggagagattggaacagtttggagggctcagaagaagataggaaaatgtgggaaagtttggaacttcctagagacttgttgaatggccttgcccaaaatgctgatagctatatggacaataaggtccaggctgaggtggtctcagatggagatgaggaacttgggaactggagtaaaggtgattcttgttatgttttagctaagagactggcaacattttgcccctgccctcaagatatgtggaactttgaacttgagaaagatgatttacagtatctggcggaagaaatttctaagcagcaaagcattcaagacatgacttgggtactgtgagttttataagggaaacagagcataaaagtttggaaaatttgcagcctatgtgatagaaaagaaaaaamccattttctggggagaaattcaaggcagctgcagaaatttgcataagwagcaaggagcctaatgttaatccccaagaccatggggaaaatgtctccaggccatgtcagagaccttcacagcagcccctcccatcacaggcccagaagcccaggaggaaaaagtggttttgtgggcctggcccagggtccctgtgctgtgtgcagcctggggacctggtgccctgcatcccagccactccagccttggctgaaaggggccaacatacagctcaggctgtggctttggaaggtggaagccccaagccttggcagcttccacatgttgttgaacctgagggtgcacagaagtcaagaattgaggtttgggaacccccacctagattttaaaagatgtatggaaaaacctggatgcccaggcaaaagtttgctgcaggggtggggccctcatggagaacctctgctaaggcagtgcagaagggaaatgtggggttggagcccccacacagagtccctactggggcactgcctagtggagctctgagaagagggccaccgtccaccagactccagaatgrtagatccactgacagcttgcaccgtgcacctggaagagccacagacactcaacgctagcttgtgaaagcagccaggagggggggctataccctacaaagccacagggttggagcttcccaagaccatgggaacccacctcttggcatcagtgtgacctggatgtgagacctggagtcaaaggagagagatcatttggagctttaaaattggactgccctgctcgatttcagacttgcatgggccctgtgacccctttgttttggccaatttctcccatttggaacagctctatttacccaatacctgtacccccattgtatctaggaagtaactagcttgcttttgattttataggctcataggaggaagggacttgccttgtctcagatgagactttggactgtggacttttaggttaatgctgaaatgaattaagactttgggggactgttgggaaggcatgattggttttgaaatgtgaggacatgagatttggagggaccaggggcagaatgatatggtttggctgtgtccccaccaaaatctcaacttgagttgtatctcccagaattcccacctgttgtaggaggtacccaggaggaagtaattgaatcatgggggccagtctttcctgtgctattctcatgatagtgaatatctcacgagatcttacggttttatcaggggtttctgcttttgcttcttcctcatttttctcttgctgccaccatgtaagaagtggcttttgccttctgccatgattctgaggcctccccagccatgtggaactgtaagtccaattaaacctcttttgcttcctagtcccagtgtgtctttatcagcagcgtgaaaacagactaatacacttggcaattggtatttatttatatgtttcatagatgtttatggttttataaatacatagtgttctctggtttgcaattttcggtgtgcctttgacattttatgttaactatatatccatttcttaagtgaattttgattcatttactcagtaacccagccgtttttacttttatttctttttagaaatctgtatacatccctgagaatacttttyatccatgtgtaacagatttcacttaactaatccagtcaggaactcctttttctcccwcatgggatgataattaaattcttttatattgggtgttatatttggatcatctyctgtcatcctaatttttattttcattttaatcattcttttgacatctctttccaattataactgcaaaatcctggccattcctcaatgcctwatgctttcttttttgtcccccttattgattacattcttctggtaaccagcctgttcctaccatagtattactgaaccaaattgctcagcaaactctcatctctctatacatctgtttaaacttttaactacttacgtcagtccagcaatttggatcctcttcgtggaaaaacagttgttactctttccttcttaatagttctgtctttgataccaaatgttatatggccctccttgatctgtggtggtattgcttcttatttttcacaataaagtggcccttcccatgagtgcccttggtttatctcttggaattggcatttaaactcagttgctgttggaagtaattccagaagtgaaatttgtcagtgagaggtgtgcactatgaatagttccttcaggtgctggaygcacttaggtccttctgttgcaggtgctgttaaataacagcttttctggacgaagagtaccttgaagtctctctgcttttatttctggggtttgtktatgtcactaaagtctcagatgagagttctgagaaaaggcttgtttgttacgtttctttaaaggtgacctagtatctctttttccttgcattaagaaggcatttcccaagagagggattgatatcttyctctttgacagttctggaagaatgtcatgagcccctttcatctccaaactggattttaaaacaatgtggaaaaactgcttcctcccagggcacatttttctgttacttcttgatttggctttttttttttttttgacatggtgtctcactcttgttgcccaggctggagtgcagtggtgtgatcttggctcactgcaacctccgcctcctgggttcaagcaattctcctgcctcagcctcctgagtagcttggattacaggcagctgccaccacccctggctaatttttgtatttttagtggagatggggtttcaccatgttggctaggctggtcttgaactcctgacctcaggcaatccacctgcctgggcctcccaaagtgctgggattacaggcgtgagccaccgcacctggccttttgattaagcttcacagacacccttcaatatgaagattaggttccttgttgcatacatcrtttgctcccctgcattcattgarttctacttgattctctgtaacaagtttcattgatttgatgttttgcagaaccaattctgttttggactgcatttctgggatgttcttaatygtcttatcattttawcctaagcttcttttaaaccccagtgtaaccttgattgattttgaaatgccacctttcatcttttcgggaatgaatgccaagtgttctctgcataacactgtttgaatcttgtagttgttccattttggttaccagagtccagttccggattcattccccttgctggctcctagggcttagagctcctgccacataatgaattttcactgatccttttttttgcaccttgttgttgtttgttttstgtttattgatattcttagtggaggagcctgttttgtcatcttaagtttttaggcagtgttgtcattatcsttgtgttttgaaacggtcttgtattttatgttttttcctgatgtaactgttactctaaaaaatgaagataatttactgaatttctttttatctttattgtattgtgacaataaaattaaaaattctgtcttaaagtagagaggattgtaaatgtacccccacagaccccatctgtcacctggtttttactaatgttcagtttttcaatctttttcgctcccaccccacagacacccttgttcgtcctggagtattttaaagcaaatcccagatactatgtcatgtcacctgtaaatgtcrgatattatatcctggggctttgctgatgtttcctcatggaatttaacttgcttctgtagacccttgtatttgctataaactgctggttagaacaagggcagcgttctcaaacattttgggctcaggaacccttcacaatcttacaatttattgaagacccccaaaatgcttgtattgagataggtcatacgtattgatattttgcatattagaaatttaaacagaaaaatttaacacatcaggagagataagcacttcctcccttggccattagagagctgatgtcaggctgaggcaggaggattgcttgaccccaggagtttaacactagcctaggcaatatcatgagaccttgtctccataaataataataataataataaaaaagccaagcgtggtagtgcacacctgtagccccagctacttaggaggctgaggtggtaggattacttgagtccaggaactagagattgcagtgagccaagatcgcaccattgcacttcagcatgggcaacagagcaagaccctgtcacaaacaaacaccaaaacatgaagagagagagagagagatgatgtcgtgatatatcatgcagcttctggaaaactctgctgtacactttgtaaagaatgagagtgaaaagggcaaataagtctttgtactattaagaaagtagttttgattttgtggactttgtgaagtagctctgggggaacgccagaagcctcagaccacactttgagaacccctgatgtggtgactcagatacattcaacttcatctttgcttttggaggggagagggcaagtatacctcctagggggtaatgtgcgcttcttacaacacacacacatatacgtatattatacatatgtaacacacatatacacacacacaaatacacacacatacatatctacacacatacacacagacacacacacacacatatacatatatatacagacatacaaatacacatatatacacacagacacaaacacacacatatacacatatatacacagacacaaatacgcacacatatatacacagacacacaaatgcacatatatacacagagacacacaaatacacatatatacatacacatatatgcacacacacatgtatttttattactatagtagttatataactactttatgtctgggagtacaactttaataccttagtcatttattttctcctttattgttatataatttccrtgtgtgtatttgtgtgttaattttccacttaaaaatttttaaaatttgtttttagttttattttgtttgagacagggtcttgccctgttgtttagcctgcagttcagtggtgtgatcttggctcactgcagcctcaaccttctcagctccagtgatcctcccacttcagcctcctgagtagctgggactatgggcgtatgccaccatgcacagctaattttttcgtgttttkttttttttttttttttttttgagatagagttttgccatgtggcccaggctggtcttgaactcccatatgatcgcccaccttggcctcccaaagtgctgggattacaggcatgagccattgtgcccggtgcttttttttctttcttttttttaactttgtatttttggcttcaattttcatttgcgggtatattgttgcacttgcatttgattaacccacttttgtattttagtcctagatgtgtttagttttcatgagccttcagtaatcagcatattgttgcatttgatttaccacagatggagaattttcttctcttaatcagaccaattaggttgcttttatctagggatgtgactgttagatttcaaataccttatatcattctggttttcttttttttkttgttgttcttacctctataagtcatgccctcctttttatttatttttaaagaagtacctaagtcatgtacatagtcgttgttaaaaaaattcaggctgggcatggtggctcacgcctgtaatcccagcactttgggaggctgaggtgggccgatcacaaggtcaggagatygagaccatcctggctaacacggtgaaaccctgtctccactaaaatgtacaaaaaaaattaactgggcatggtagcaggtgcctgtagtcccagctactcgggaggctgaggcaggagaatggtgtgaactcsggaggcggagcttgcaatgagccgagatcgcaccactgcactccagcctgggtgacagagctagactccgtctcaaaaaaaaaaaaattcaataatagggaaatagagtaaagcaatagcccatctccaggctttccagctccatgctaatttgcactgtgggtaatgtatcgtgcamctttcaaaacattttctacacatattggcacacgcagaaataaaataaatgtataagttttatggcttttaaaaatggtaggccgggcgtggtagctcactcctgtaatcccagcagtttgggaggccgaggcggatggatcacttgaggtcaggagttggaggccagcctggccaacatggtgaaaccccgtctctactaaaaattacaaaaattatccggcatggtggtgggtgcctgtaatcccagctacttgagaggttgaggactcttttccctatggtggggcacattagtttcatcttctgttgtgtttttgttctttccttggagttgcttattctggtgcccagggtgcagctctgctctgctctctgctggccccaggacagctgcaaaaccctcctaagaattgcttccactctgctatgtttcgtgtcctgtttccttgagcagcagcatgagttttaaatataactgtagggttttacttgattctaagttcaaagtagtgacacaggggtccccaacccctgggccacaaactggtctgtggcctgttaggaacctggcctcacagcaggaggtgagtggtggcaagcgatcgaagcttcatctgtatttacagctgctccccattgcttgcattaccacctgagctccacctcctgtcaggccagtagcagcattagattctcataggagtgtgaaacctttgtgaactgtgcatgtgagggatctaggatgagtgcttcttatgagaatctaatgtctgatcatctgtcaccgtctcccatcacccccagatgggagacagtgacatctagttgcaggaaaacaagctcaggggtcccactgattctgcataatgttgagtaagtagtaataatagcagtaaagtgcagaataaatgtaatgctcttgaatcatcctgaaaccacccctcccctctagtctgtggacaaattatcttctatgaaacttgtccctggtgccaaaaaggttggggactgctgtagtgacaataactcacatttattgaccaggtactacgtgacagtcacctcagatgtcccatctcatatgatatttgcagcaactctattaggtaaacactatttttgctttcattttacaaattaggtaagtgaagcatagagaggttaaataacttgagggtaattcttccaagggggtggagtcagattcacacccaaacaatctctcctgtctactgcattgtcattaagagtgatgaagagcccaagaaccarcctcattctagcctttaccaatrtgtgtatctctttcttatttttggtttactttctcagaatctttggttctagtagatttttaaaattaaacctttgtttcctctgccatctctgttatctctttctggaatgcttctgtgtcaggtgctagatctcagttgatcacttgctttttattctctcactttttttggtcttttaatttaattttctgaaaaatttcttcaatttgatcttccaactcttctggagttttaaattttttgttatatttaatttccaagagcctttcttatttcctgacttttcctttttctaagtatcctgttcttgtttaatgaatatggtatctttccctygattctctgaggatgataagggggtttcccttgtgttctgcaaggggtctgtctactccttgctccaagtgtattttacctatttgtaggcttttatgtctgtcctcatatttttattttcctcaaatgtctggtgatgctttgttcttttgtatttatgaggaaggcactaatatgtttggtagctttctgtgcattgtggtggtaagaggaagccaatggttctcactggtaggtgctctggcaggtggatggctgttttgctgggtgtatgaaatgaattatgtccctccaaaattcatttgttgagtcctgtgaacctaagttctctgaaaagtaatttggaggaaagagacttcattccagtgaatagtttgcaaacaagggagccacrtctttggtgtaaaacaaaggtgagttccagagaacaaatacgttcagggtttatagcaaaactccctgctgaggttcccaattaagtccatttatgcaaatgaaggatttggacttgcttagttctggttggtcacacagctgaatcatgactggttgatgtggttgaaccctgactggatggagcgggtgagctctgattggttggtttccaagccccaaaccagaagtctctgttagacctttcaaaaggccagttgggaggtggrggaattcttgcttcagtttatcttggcaccaacaacagaaactggtttggcttgattgtagaaagggaggtcctgtgatattttcataacatctttctgagaacacattgtacgtgacyttcataacatctttctgagaacacagtgtatgcgactgaaccttcacccagccatgaccacctggttctgctctaactcaccctaaatagccatggggtgtagtycattttatctgtcagyagaggcatacttttatggtcctaacctcaagtatctcrgaatgtgtctgtacttggagatagggctttgaaagagaaaatgggagttaaacgaggtcactggggtggcccttaatccaatatgcctggtgtcctcgtaagaaaaggagattaggacacagacacacagggggaagaccatgtgaagacacttggaagatacagccatctacaagccaaggagagacgtctcagaatgaaaccaaccctgctgacarcttggactttcagcctccagaactgtgaaaaaataaatttctggtgttcaatacacccccctctgtattagtttgtaatggcaaactaatatatgaagtgaagcccaaatacccatatctatagatctttcctctagggctattcagttttcctagagaggaaacttctagtattctgctgggagtctaggcctgctgtgtgcatgctgggcgctgagcctcatgaaggagctcaggactctccatctgggatctagactttcatggaactttsctttgctcccattaccccttgcccttttctgtgcctgggaccccagccctggagcccctagtgggaggtactcagctgtctgggtggaattggcacaggggtggactatggaggactaaggggagagcagcattctatccatgttcccacaaaagacaggatctcctttttcatggctgcatagtatttcatggtgtatgtgtaccacattttctttatccaatctgtcattgatgggcatttaggttgattccatgtaaccttatacagaattacagccatgcttttttttttttttttttttttccaaccctacaacttgttcctcacctcccggagcctcctctctggggtcctgggcatgaattaacatctccctccgtagccaattggaattccactcggctgacttctccttcatttcttctttcaaacttctgttcgtgttgcctgtctgcagtctccttttgctttcttgtccttgtaaatccatagattctccctgctatggactgaccataagggactaattgatagtgcagtggtcaggctgatgtcagcatgcttctgcagtggaggaatctgacccagaaactcatctctttgcatctctgcacgctgctgcctttgatgtaagcttcatttttaactttgtgttttgaaatagttttagacttgcaggaaagttgcaaagataatacagagagttccctaatggtaacatcttacgtaactgtggtatgatggtcaaagctcataaattagcattagtacaatactgtcaagtaaactacagaccttatttagatttttttttttttttttttttttgacgaagtctttgtttcctaggctggaatgtggtggcatgatctcagctcactgcaaacttcacttcctgggttcaagcgactctgctgcctcagcctctggatgagctgggattacgggcacccggcaccacgccckgctaattttgattttttagtagagatggggtttcaccatgttggccagactggactcaaactcttgacctcaggtgatcagccagcctcagccttccaaggtgctgggattataggtgtgagccaccactgctggcccttatttagattttaccagatttcccagtaatgtgccttattttctgttcccaaatccaatccagggtcccatattgtagttcattgttagggttccttagtcacttctaatctgagcctcacacacccaggctggagtacagtggctcgatctcggctcactgcaacctctgcctcccaggctcaaatgattctcttgccttggcctcccgagtagctgggattacaggtgtccgcaccacgccaggctaatttttgtatttttagtagagacaaggtttctccatgttgtccaggctggtcttgaactcctgatctcaagcaattaacccgcctctgcctcccaragtgctgggattataggagttagccatcgtgcccagcacctgaccttcttacttttgaagaggactagtcaggtgttttgtggaatgtttcttcatttgagtttgactggcttttattcatgatttgatttagatttgggggaaggacatcagagaggtgatgtgtccttctaagtgcatcatatgtcttactactggtgacgttgttactgattcttagcttaagatggtttctggccgggtgcagtggctcgcacctgtaatcccaacactttgggagaccaagttgggagggtcacttgaggccaggagttcaaggccagcctggacaacatagccagacccttcctctacaaaaaaccccccaaaattarctggtcaccgtggtattcacttgtagtcccagctactctggaggctgatgggggaccatcacttgagctcagcagtttaaggttgcagtgagctttggtcacaccactgcactccagcctgggcaacagggagagaccacctgtccccctacccccaaaaaagatagtttctttcaggtttttcctgtaaagttacagtggagtgtagaggtttcttcttatgtaattaatatatactcggaggctatgcaaatatctaattttttttctcttaaacttttgccaactatttttagcattcactgatggacgttgctggcagtctaagtggtgcgtttctagctctctcattcctcccacatttattaattgaaattcttctgtaaggaagaattgtcccttctatcccagttatttgtttattcagtcatgtatttatatcagtatggacttatgaatatttattttaacctttaagctatatctaatactatgtttatttctcttcttgctcaaattgttctagctttgaccactgggaactctttcaggttggcttctgtgcccttttgacatgaccccataatcccracttttttttttcgagcacttaactttttcttttttaaaaaaacttttattttaggttcaggggtacatgtgaaggtttgttacacaggtgaactcatgttacgggggcttgtcgtacagattattccatcacccaggtattaagcctggtacccaatagttaccttgtctgctcctctccttcctcccaccctccaccctccatgctcaagtagccccagtgtgtgttgttccctctttgtgttsatgtgttctcatcatttaacctcccacttattagtgagaacatgtggtatttggatttctcttcctgcattagtttactaaaggataatggccttcagttccatccatatttctgcaaaggacatgatctcattcttttttatggctgcataatattctgtggtatatatataccacattttctttatccaatttgtcattgataggcatttaggttgattccatgtcttgattatttcacttgtattttgatgaggtttcagaaagaagcagagaagcaggtgttcaatacatttttatttttatttttattgttttttatgtctgttgcccaggctggagagcagtggtgcgatctcagctcactgcaacctctgcctcctgggttcaagtgattctcctgccttagcttcctgagtagggtagtcatatgccaccatgcctggctaactttgtatttttagtaaacggagttttgccatgtcggccaggctggtctcaaacctctgacctcaagggatccttcgccttgtcctcccaaagtktcgggattacaggcatgaaccgagcctggcctcaatacattcttcctaaacttttttgatcatcaagattttctttgtttcttatgatgttttccattattttaaatttatattagctgtcatctaaacaaatcatctctgcagtggacatctgtttgagagagtgcttccagttctcatccttccaagaacagtaacctgaatttacttcccatccttacccatgtgtgcttgggggctgatactacatgtaggtgtaaaccacgtggtatatccgtcctggtcaaagccagcaaaccaygagaacaccttttctagggcttttggaaaggggaggtttctcttccttgcaaggaagctgccagaggarctgttctttctttggatggtgatgtgttctgaaacaacatctggagctgctgtagccactggatcactatgagctgaggctggaactgctatgagagccccaggtggagcccagcctgggaggaagaggagttccaaagaatcagcaccttggggttttgtttgagtttctgttgtaggaagcctcacctaaccttttgaatattcaacccatgaaccaaaatactctattgttgaaaccaatctatattggttttcttggcaacttcagtcctaaccagcataaactcattattttattttttttctttttgagacagagtctccctctgccacccaggctggaggggcktgatctctgctcactgcaacctccacctcctgggttcaagtgattctcttgcctcagcctccygygtagctgtgactacaggtgcatgccaccacactcagctaatttttgtatttttagtagagatggggtttcgccatgttggccaggctggtcttgaactcctgacctcaagtgatctgcccgcctcagcctcccaaagtgctgggattataggcatgagccaccgcacacagcccatagactcattcttacagaaattgtgcttcactaccttaaattttcaggtagagcatgcactagggattattatatctgagtcgatctgcaaatattttgaagcaaacacatcttattttctgtttccaggctggccagagctttctgctgcataatggcggcagcgattacattgcacgttgcttctttgacatctgagatgtttgaggctggaaactcactgcctcaggccttctgttagtgagaaacgccaattaagttcagtgaataaattgagctgcatgttagctttcagacacagagaagttccgtactgtatctaagaaacttcccgaaatgtcttgttccagtggatgacrtaacttgtcgtttgactaagaaattgcatcttaggaaattatctcaaggaaataagcagacaagtatttatacacaaggaaggtataagccagaggattactrccatgctgtcattccccgggaaaattgggtatagcatttaaatgagcaataatgggcaattgattaagtaaatgatgatacattcatggcctgccatgctatgcagccattaaacaatgatgttgatgtatatttttgacatgaaattwtgcttatggtacactattaggttaaaaaaagagacaagttatatcacagtaagtaaagtataattgcattttgtaaaaaattgtgtgtatacatatgcatataaatgagatgtatacatatatatatgcatgtaaaagattagaggatatatcattttgaccttttgatgacttgctgtttttctagatcaaagctatatggtttatgagcaatatattaataaagaattaactatctttaatttgttgagtaaataaactaaaacaagaatgagctatctgacaccagggtccttctttaggaacttcaattttggaacaatgaatgaagtgagtagggcgcttctttaatatctaatcattttgtgaactgttaaggtcttaagtgtctgtggtttggatatgtctcctaccatctgcccttggccttcctggtggttggcctgggaaccccggggtggagacagggcttctgtttggagagcagcagagcaaagttgaacatcaaaagccatgggcctggattctaatttggaaacctcctttttctatcttcgtggtctaggccaactcagtcctctgttccactggggcatgatgaggttggctttcttttttctttttctttgagaccgagtcttgctgtttcacccaggctggagtgcagtggcatgatcaacctctgcctcccggtttcaagtgattctcccacctcagcctccaaagtagctgggattacaggtatgcaccaccatgcccagctaatttttgtatttttagtacagatacggtttcgccatgttggccaggctggtctcgaactcctgacctcaggtgatccaccctcctcggcctcccaaagtgctgggatyacagacgtgagcaactacacctggctggccgtctttacttcaaagcagtggagtcacagagccttatacatgaatggaaagtattgccaaaaggctccgtggtccttttgggtctcctttggaaaagaagctgggacatttgctttgccctgcccccttcctatgacagtccgtcccccctctatgtgctgccgtccaaggaaccacacttctttggaacaaagggagctgggcaggatcatctctgtcccctccagcttttgagcccctccttgaaatctgcatttaaagcattcagaagatgctgagcatgatggctcactcctgtaatcccagcactttgggaggccgaggtgggaggatggcttgaacccaggagttcaagaagagcctgggcaagatagggagacaccgtctctacaaaaaaaaaaaaaaaaaaaaaaaaaagcaaaatgcaaaaattagctgggcatggtggtatgtgccagtagtcgcagctacttgggagactgaggcgggagaattgcttgagtgcaggagttcaaggctgcagtgggccatgattgcgcaattgtactccagcctggatgagagagcaagaccctgtctctaaaaaatggaaaaaaaaaaaatcattgagaagagagaacccagaggttgagatgtgctggtccctgggagaactcaggggagatcccagttctctggaggccagccgtccaaaagcatttctcacccattttcctgcatttcatggacacacaatttggatgcctaggggtttttcataagccatgattatgtttttttggcgagagacccctgttatccctcctaccccccttgctagatggcttaatttcgtttgctctcaccatttgatttgatttgatggcatacagcatgaggttcccaaatcatttctgcctgttaagcaaacatatatttctgggattgatgttttaatttaatgaaatacattctaatgagggtcagctgcagccatgaatttttttatgagtgatttgccaaaaaacccattgcctggtgacattctgtgcttggctgagcgagtctgagagagagtcctggttccagctcacgggttgaggaagagacacagggcaagattctgccggtcgtggcatgcctggatttccatgctaggtgctatgtcggtttctctgcttctgtgctggtggctcatcagatgccttcttccctggatatgcataggagtaattcagcccgatagaggaggagacagtggcctgagaggaccccagtttggtgtttgatccagggctcatcttcaggatacagcaaggcagataatgaggagggacttgcttggtgtgtgtgtgtgtctgtgatgtacacgtgtgtgttggaggccagggtgggaaggggcccacacacagcccagctgtctctaaacagcccctgatgtcccagccaagcaggagtacaggatggctggactctgctaaaagctcctaactcaacccagcaaacgttaagtctatgctagtggccatccctggttccatctgggacctgtgagaagtcatggaatcaaccgtccacctccactcagctcaggtgacctggggccaacacagstggtgtcctgtctagaagccattgcccttgaatttgtttcctgtagcccttgtaacaaattgccacaaacttaaggccttcaaacaacagaaatgtatcctcccaattaaggaggccagatgtccaaaatcaataccacggggctgaaatcaaggtgtcagcagggctgcactccctccagaggctctagaagagaatctcttccttgtctcttgcaggttcccgtggctcccaacattccttggcttgtggcggcatcactctataatagggccagcatcttccaatctttctatgctttgtcttcacctcaactcttttctyctgcatgtgtctattgaacttcccctgcctccttataaaaacttgtggttgcattttgggcccctttggataatccaggctaatgtccccatctcaggagccctaacttgatcacatttgcagagaccctgtttccaaataaattaccattcatgggttccagggatcaggacttgctatctttgggtggcagtcgttagccctttttttttccctcctcggcaaagtactgatttgatcctacctggccaatacttatattgcaggctgttcagttcccctatgcctggatcatccagggctggggcttggttctgacccgtgacgtgaaaggcaattcaacagtggccgcctgggatatgcttccttcaccgacagagcagtatgcggaaagagtcctcctgccttttcctctttgccccgggtgctgcattgtgacagcgtgattcttggaggagatatagccattttatgatcatgggtggatggccaagagaatcgtgaaggatgtggcccagcgctcagatggtgctgctgctgcctctgcatctttctggctcaggccactgcgacttgggagttgcagccagaaggctgtcaacggacccaggattcccctgggaggctccttctgccttagcagactggccagcattggcctgagtggctttagcggggacggtgagaccaagatggccccgtctggacccagactcatgttttggagcgtttcctggctctttcgtcagcctcagtccatttggacagctgccagctgcatggtttggtggtggttgtgagcttggctctctgatagccgatgagtctgaagagtaaggccaaagcaaggaaatctacatatgggaggcacatttagggacacttgtgatccatttctattctcactgtgaagaggaatctcccagcagtctccaaacagcccctgatgtcccagttgagcaagggtacagggtggctggactctactaaaggtgcctaactcaacccagcaaacgttaagtctatgctactggccagccctagtcccatctgagacctgtgagaagtcatggaatggaccctccgcctccacctagttcgatgtctgtgacaagctgtgccccaggcagggcacattctcacttgggtcacctccgtggccggaagggtaataatggaaaaaagccaagagcggcagcctgtgtctgtggactgagccagaggccagctgggcctgtttgcttggcttgagctgcagagtggatctcaggcattgcccagcacaggccttggagaaaacatggtgctgagcatgtgttaggcagaggctgcaaggaagagccaaggagaataggcccagtgagtataggggtgagaggatggaggggtttggcctggagaagagaaagcaaagggtgtctctggtataattattgctgctttttctctgtgtgcctcccaactccccatgagacagaatgtcaaatatcaggtaactggttaaaattaaagtggagtactagtatatcatttcagaatactttcagcctcaagaaacagaaagccaactaatagcagattgaataggggtttrttttatatacaaccaagaatttgggaaggagctgccattgcatggagtgagaagctaaaggtcaaggcccccctcatgggtgcaaagaggctaccatagctccaggcatgcagcccacgttcaagaaacagggagggaagttggtaccagcatcaggagaacaacagctttctcttcttttccacgcacaccccctcccctgccaccagccgactttccctgtgttcctttggtcagaactctgtcacttggccacccttagctgcagaggaggccggcatggtgagtggttggggactgtggatgaggactggttagatagccagtagtgttggcacagtgccgcttaaggagccttggtgtctgggcacctataggaagagagcagacaaccatcttcattaggagccatggaccctgcccgggaggttaggagggcatccagacccatccctgggtgtgtttttggtttttcagatccccttcgtgagcatgctggggagtccgccttggttttccaaagatagagcacatgagacagtggttttcaaagtgtgtgccccaaaccaacgtcgtcaagatcacctgggaatgtgttagagttgtaaagtcttgggccccaccgcagactcattgaatcagaaactgtagcgtgaggaccagctctctgtgtctgaacaagccctctgggtaatactgatgcaggaacaaatttgagaaccttagacttaggatttctgaaatatgactatctctggggagggaagggaaagaaaaggaatagtaagaaattcattcacatttgtaaattattcctctttttcttaaggtgatctaagctttaaattcactttccccattagtaataatcagtgaaattcatgagggaatttcatctgtccatggttcatgttggactgaaggatatttttgctgttttttttttttttccagtagaccctgggatggttgaccttagacttgaatcttttgggagcttgtttacaatgcagatttctgagctggtatctgggttttcccccagatatttggatttagtagatataggatgggctcaggaatctgcaacatggcaggcgatttggatacaggtaatctgcaaactgcacctggagaagtgcaagtccagagcttgctatggaagagagggtggatggaaagatgggtgttttagtcggcttgggctgctgtaatgaaataccatagactgagtggcttaaacracagacatctttttcccccatgattctgaaggctgaaaagacaaagatcagggtgccagcatggtcagatactggtgagggctctcttcctggtttgcagttggttaccttctcattgtgtcctcacatgacagatagagcaaggagagaagaaaggagagagaaaagagaagaggggagtgggggagggagagagagagggagggagagggagagagagagagagggagagggagagagagagcgctttctagtctcttctttctcttcttataagggcactaatcccattatgagggccccaccctcatgacaccatctaaacctaattacctcccaaaggccccaccttcaaataccatgacattgcagggatataggttcagcatgaaatttaggggaggcacaggcattaagtccataacattggggaagtaggttctcagtggctcctctcccttgggttatatgagggtctttagtagcttcagaattccctgagttgtattcagagtcaccatttgctttggagaattctaggattgctacatagaccagcgaacatggggagattcagggagtgtgagcaaatattgagaaagagagtttgggatgtaaggtcatgagtcataaagtgtgtggatgyrcagtccttctctctgaggggatctgccaaatccctraggcctacacatttctgtccttagatttcttgttctttctttctgtaattactgcccaccactgcccccaccccaccatctcatttgtgcaggggtgaaagattgaacaccttttgggagccttggtggtcagggtcagtgggggtggtgcagccttgcagaacatgctctactgccactgaccattccagggttacttgtattttagccaaagcagtggggagtagrggggagtcanagatatagggcataggaaagcaggagttagggactaggggggatttaataagtgattggargtgatgcagggcaggtgagccctaaaattggggcttamcctgggaaggtttttggctttgctcaggaaagaattcaagagtgagccagtagtagaagaaaccagctttatggaggcattagtgttacagctctgtgactgctcctgcagagcagggctgccccatargcagtgtgtggagtgcagccgctcagggtccgtgctgcagttctatttatacccacttttaattacacgcaaattaaggggtgggttatgcagaaatttctagaygaggggtggtaacttctgggtgtggccatggcagtggtgggctgtcatggtgctgatgggtgtatgttatggagaggtgcttttggtgcctcttccgtaatttagccagttaccaatctcgtccaaagtccagtcccatctcctatctcagaagtagcatacatttccacagtgagttccaagttcacacatattgtctcctttaatcctctcaacaaccctgtgaagtaggttctactccctgcattacagagggggaaactgaggtccagagagctgaagaagggcttcttcaccaacccggaagaaagccatttgaaatattcccgtgttcggctgctaaccctggtggctctctkccccacactcctgttcctccatctttctcacaccttcctttccaagtgtggagtctatgagttattgagctsacaagcctggggcagtgtcaggggtaagagccaatccctaccttgtggcttttgtcccatgttcacaggactagggtgaggtgttggagggagagaggatggcgagggagctgggcagtccctggatgagckcatcctccatcagcatcgtgtcttctgttctgaaggctcccaagacagtacctctgtgagggactcatatcagctgaaagttaccttcaacagaagtagaccttagaaggccaatgaattaaattgcaaagagagatagaactgctccagagcctagcatattctcattggcatgatctgtgcaagagttccctgttggccatatgggaagccaggatgatcagaaggttgctctgggagcctatattcaggacaaggggagccggatgaatccagcctgtgatggcargagtctgggatggtgggtgcatctctactgcctgatggtaggggtggccttgcctttggggctctcattctctggttctgtgctgacccacagcccttgggagcacacatgtattagtccattctcacattgctgtaaagaactacctgggactgggtaattcataaagaaaacaggtttcattgactcacagttccacaggttgtacaggaagcatgacttgggaggcctcaggaaaatcatggtggaaggcaaaggggaagcaggcacgtctcacatggccagagaaggagaaagtggtcaaagagggaggtgccacacacttttaaacaatcagatctcatgagaactcactatcatgagaacagcaagggggaaatctgcccccgtgatccagtcacctcccaccaggtccctctttcaatactggagattacaacttgacgtgagatttgggtgggacacacatccaaacccaaaccatatcaacacacttcttgctttgggtggtttagcacaaccaaccaggctacaatcggagagctatcctgtcacttttaggtagtttgcatgatcagtttctgagctatctgtaaggacattgcatttaattttataagtttatttatttatttgagtcagagtctcactctgtcgcccaggctggagtgcagtggcgcaatctcggctcactgctacctctgcctcccaggttcaagctattcttgtggctcagcctcccaagtagctagattacaggcatctgccaccacacccagctaattttttgtatttttagtagagagacagggtttcactgtgttgcccaggctggtcttgaactgctgagctcaggtgatcagcccacttcggcctcccaaagtgttaagattagagatgtgagccaccgctcccgacccattgcatttaaccttgaagtacaaaccaaggaggagggaaggggtagggtgaatggagggaaactaaactgcacccactacaaactgagctgcctgtcctggaacagagcttgctttcatccgtggtcataatgaaccatgttgacatggaactttctagcaagataaaccacagtgctgaaccagatgcgttatttccactgttcaagcaggtttccatattagggatgctgactcctgaatttggggactggagatttgttctgtgttgccaggtggcctgggtgtctaagtgcctttttgtaccttgtctcctcctgcatagtgactgttgggtctcctgcctatgcagaggacgctggaggtttgattttgatcttaaggataaaaagttcggtctgttcagcggggcgcggtggctcatgcctgtaatcctagcactttgggaggctgaggcgggcagattgcctgagctcaggagtttgagaccagcctgggcaacacagtgaaactctgtctctactaaaatacaaaaaatcagctgggtgtggcatcgtgcgcctgtagtcccagctactcgggaggctgaggcaggagaatcacttgaacccgggaggcagaggttgcagtgagccaagattgcgccattgcactccagcctgggtgacagagcaacactccatctcggaaaaaaaaaaaaaaaatttggtctgttcgttttaggtgttgcccgtggttgagaatcagaccctctgcccagggtttgtgactttattgcacagaaggctgcatcacccgcaaccgtcatcttaatactgccaccgaatttcattttgctgtttttgtttgcgaaggacctggagtgactcggatagaattactgctggaataaatgacgtatgaaatgagaaatctttgtccagtgttgcaagggggagggagagaagaaaagaaaggctttgatggaaccgctgttgtacagaattagtttccataagaccagaaaatacagaagaacaaaataaaacgtcatcagatatttttctccagatttactgaaaagtcaggcttttatcaatctcccagcaccgcattcaggctcccagtgatggaaagtaatgggtcttgcaccaaacgaaagcaaacttctatttagtctagcctgtggcctgggttcccccagctccagcaccgggaagcatgaggaagggggtgcccttctcctcaagctccactccttcttcatggggacaagctccactccttcttccttccatctggttcccagtgtccttggatttgcatctcctgtgccatttaaaagtctgctcttggtcaggcacagtggcttacgcctttaatcccagcactttggcatgctgaggcgggtggatcacctgaggtcaggagttcgagaccaggctaaccaacatggtagaaaccctgtctctgttaaaaacacaaaaattagccgggcgtggtggcaggcacctgtaatcccagctacttgggaggctaaagcaggagaattgcttgaacccaggaggtggaggttgcagtgagctgagatcgcgccactgcacttcagcctgggtagacagagtgagactctgtctcaaaaaaattaaataaaaaaaaaaataaaaatctactctcttaggaaaagagctgacaaactcacttacactgaggtgtaaggggcggctgagggcttcattgctaccctatctcagggtattttaattttcaatggtgtaaaactgagytccaaagaccaaactgaaacttgctgcaccagaaagcaaactgctttgtcaaggccactggctgtaggtttcagcaataccattgtcctcacagcctcactgttggacrggcctagtctcctgcttagggcgtttttctccagggctctgcaaactacacatcctgggtgcctgcataattggctgcctataggggtgccttgttatctttttctataagatggggaatacattgctttgccttagacttgctgtcatctgtcccacctgggagggacgggctggtgttccctctgctgccaaacactcctggatcgcaggatgcaacctccaggctgtgtgctgatgcaaccgaacaatagcaacaagaaccagaaacatggaatccaggccagccctcggcgggggcacctgcccttgacctccctcgcagcacttctgcggggtgtttacaaaaactgcacctgctctaatagctgatggtcgtgctgggagaaaataataatctaagccattagagagagagaagaaaagaaagccaggacggggaagggaatgatccatcctctgctctatttttgtctgtgctccacgctcactgagtgtccttgagggagatgcctaagttctttgtcttggtttgttactgccctggcaaaatctcatgcatcgcctgccagaacacccagggaatctcgtggctccctgacaatgcacaaacacgctgccacattcttttttgggggtccagagagtgggaggtagggtcaaaaaccacgggagtggaactgaaatacccccattcatccaatcataggcagatcgcctccttctttaaattgcctttgaaaaatagctttattgtctccgtatgtaatgcaagtaggcattcccccggcaagttcgggggagtagctgacatttgttgactgtttactgtaggtgtgaactttatatgcaccatttcacttgatccccattttcaagatgagagaattggggctcagaggggtgtagtcatttgcctgggacggaacaggaagatgtctggaataagggccagccctgggtagatgtggtggctcatgcttgtaatcccagcgctttgggaggccaaggcagatcgcttgaggccaggagtctgagaccaacttggccaacatagtaagatcccatctctgaaaaaaaaaaaaaaaaaaaaagaaaaaacagggcataattgtgtacgcctgtagtcccagctactcaggaggctgacatgggaggactgcttgagcccaggagcttgaggctactgcgagttataatcaggctatggcactccagcatgggtgacagagtgataccctttctcaaaaaccaaacaaacaaacaagtaaacggaaaatagccagccccagcacagagcttagcacacagccaggggsttaataaataattagtggctaaataagagttttggaactttttggggatgttttcccatcaccccactgcctcttaatgcctcagtttactcacttttcaaataggagtgtggactggtggactagatctttgtgtgtgatggggatgcgttagggggcacccgtttctatccttgctgagtttgaaatcacttgagaaataaacacgggaatctgaccaatggagtgaaaaatatccactttatttattgagagaagctgtgcttaagggcgtggcttagatccatggccacagtgagtctcccactaatccactccactatttaatgtattcagcaaacagagccagagctgggcagctcccctgtggcacagagcacattccataaggcagagggcagagcagccacactctctctctgagcaggcagaactgtaggagagagccccagaggaactgagccaagagcagttactttcttttgcagtatttcaggcatggaggggactctggttccagggtgggaggcagggaaggtgaggggttgggaaagaggtctctcccagaagcctttcacatttgcatctagctgcattcggaatttatttatttatttagagagacatggtctcactctgtctcccaggctggagtgcagtggtgtgaccataactcactgcacccttcaacttatgggctcaagtgatcctcctgcctcagcctcccaaagtgttggggttacaggcatgagccatcaccccactgcacctggtctgtgttcagtatttattataaatgatgggctaaatattgaaaggtggggaaatgaaggtctcgccagccctgtgaatgactgggattctgtgtgtgttctggcttccaagtgggataatgaaatggtgcctctctctgtgtgcggttaaacacccattcataccacaaggaggttgtagtcagcagcctgtctggtggccccgtgggggtctccagcatttatacccttgttaatcctctcccctggaatgtgggtgggacctattgactcattctaataactacaatgcagcagagaccatgtgtgccacttctgaaattaggttataataagactgtggcttctatcttagggtgtgccctctctccgtctctcaygtcactcacctgggagaactcagctgccacaccgtgaggtccccttgtagataagccacatggcaagggcttgaggcctgtcagcaaccgtgtgagtgaatctggaggagaattcccccttgtccccagtcaagcctagagatgagcctgcagccccagccgacagtcccaytgcaatctaatgagacaccttgagtcagaggcaccaagctatgctatgcccaaatttcccacccatagaaactctgggatagtaaatattgtttgggctgggcacagkggctcatgcctataattccaatgctttgggaggctgaggtgggaggattacttagggccaggagttcaagaccagccttggcaacatggtgagaccctgtctgtacccccccccaaaaaaaaataaataaaaattagctggrcatggtggtacatgcctgtagtcccagctacctggggactgaggcaaaaggatcacttgagcccaggaattcaaggctgcagtgagctatgattgtgctactgcaccccagcctagacaacagagagacaccctgtcttgaaaaagaaataaataaatgaaataaaaaaatactgtgttcatgactcagttggggtaatttgttatgcagcaagagagatctaatgtcaaagccctttctcttttcttctgagaggttcctgcatgacagcagtatctagaagggccagtgatgctttaaccccaaggcttctgatttcacgaagcagggctggatctctgaaacggcacagctgagcagagcttgggattgtttttcactccaggccccaaagtagggacacagacaagctgggacatgtgacgaggctctggaaaacaggtttaaaaataactttactagctcacactctgaaatttaagccatccatttaggaaatgctgagtgtggctagaaaaatgagttttacattgttattcttcaagaataaagtgataagtgacttcagagtaaggggaagtggttgtttgcagagcttattaaaaataagctgtcatttctgtcctatattacatttgagtcactgggagttaaaactcagttttcttacatttgggtgttttaagagactttggacatattgaaataaaagaatgcctcacagttacacagaagtgacatttcccacgttttcccttagagggtggaacgttaaaagcttgcctaactcttttggatccttacctagtagctacttcacagcctggggagaagacagaagtagacagagatgcatgcctgtctcagccgagaccggagaattgtcaattgtatttagatgagatataatctcagatatcaaatgtattttttcgttgtttttaatttcagtttttattttggattcaaggggtacatgtgcaggtttgttacaacggtttattgcatgatgctgaggtttgggcttcaggtgaactcatcacctaggtagcacagtatccagtaggtagtttttcaacactcacttcccttcttgtctccctstatttggagtccccagtgtctgttgttctcacctgttaagtccataggtacccattgtttagatcccacttataagtgagaacatgcagtatttggttttctgtgtctgcattaattctcttaagataatggcctccagctgcatccaggttgccgcaaaggccatggttttgttcttttttatgcctgtctagtattccatggcgtatacgtaccatattttcttttttctttttttyyttttttttgagatggagtctcgctgtcgcccaggctggagtgcagtggtgcgatctcggctcactgcaggctccgccccccgggttcacgccattctcctgcctcagcctcccgagttgctgggactacaggcrcccgccacctcgcctggctaattttttgtatttttagtagagacggagtttcaccgtgttagccaggatggtctcgatctcctgacctcgtgatccgcctgcctcttcctcccaaagtgctgggattacaggtgtgagccactcgtactacattttctttatccagtccactgttgatgggcacctaggttgattccatgtctttgatattgggaatggaaatggcagcattttggggatcagatagttctgttgctctggctctgagcttgctgtgtttatgatgatgttctctgtaagttctttgaaagtggcttgttttgccatcatacttggaatattctaaagttaaaaattttcaaggagacgaatgcccttggattacttgatacctttctcactctttctctcctccctggtttggcggatctggtaagggccctgatggtagagttgtttgggtaagtaagctccctggggataaacatcaacttctgttgtatccttccccctttgtgaaaaagattgctgtttgtccacttcaccctccctagagataggctttttagctggacatgtggccacccagagaagaatgatacttcccagcttctcttgcattgtggtcgcctggaggtgagtagatcctttcctctaaggagatataaaccaaagaacagggatgtgaaccaaagtgccacgttccatttccaattttgctcttaaaggcaaggagcatgctttactcttccctttcctcttagtctgtttgtgttgccataaaggaatacctgaggctgggtgcagtgtctcatgcctgtaatcccagcattttgagaggctgaggcaggaggattgcttgaagccaggagttcccaaccagcttggacaacatagggagaccttgtctgtacaaaaaatttaaaaaattagccaggtatggtgatgtgaacctgtagtcccagcagcttgggaggctgaggcaggaggattgcttgagcccaggagttctaggctgcagtgagccatgatcacgcccctgcacccctgcctaggtgacaggatgagaccttatcccaaaaaaaagaatacccgagggttggtaatttacaaagcaaagaggcttatttggctcatggttctgcagattgtacaagaagcatggtgccagcatctgcttgtggtgaggacctcaggaaacttccactcatggctgaagaggaagggcagcctgcatgtcacatgttgagagggagcaagagagagagagaaggtggtgccagacccttttaaacaaccagctttcttgtgaactagtggagcaagaacttgctcaattcaatgaggagggcaccaagccattcatgagggatctgtctccaaaacccaaacaccttccacttggcccacctctgccattagggatcacatttctttttttttttttttctttttctttttctttttttttttttttgagacagagtctcactctgtcgcccaggctggagtgcagtggcgccatctcagctcactgcaaactccgcctcctgggttcacgcattctcctgcttcagcctcccgagtagctgggactacaggcgcctaccaccacgcccggctaattttttgtatttttagtagagacagggtttcaccatgttagccaggatggtctcgatctcctgacctcgtgatccgccctcctcagcctcccaaagtgctgggattacaggtgtgagccaccgcgcctggtcagggatcacatttcaacatggagatttggaggggatgaacgtccaaactgattcacctcctatctgccacaggctggaatgcagatgtagttttgagtcaacttggactacaaggaagagggcaacatttagggatagtggggaggaacttacagcctgggcccctgaggactttgctgtgcaagactgccatcttccctggtaaagctggtgtcattttaggtctctgtcacaaacagcagaactgatatgctaactcacatccttttatgtctcccagggtgcccattactgggcctactatagaagacactcaatgttcattgcaggtgtactttacctttctgtggtttacagctagttaggccattagaatcttagagttgggaagaatattctagataacctatctggtccactgatatgatttggctctgtgtccccacccaaatctcatcttgaattgtaatctccctaatccctacatgttgagggagggtccaggtgggaggtgattggatcctgggggtggtttcctcaaggctgttsttgtgatagtgagtgatttctcaygagatctgatggytttacaaggcagttttctctgatctttcttgtcctctcttgctgccaccatgtgagaygtgcttcttccccatctgtcatgattgtaagtttcctgaggcctccccagccatgtggagctgtgagtcaattaaatctcttttctctataaattacctcttttctttataattaaacctcttttctttataaattacccagtctcagatatrtctttatggcagtgcgaaaatagactaatacatctactcttcaatgatttcagtgtctgctcatcattcttgtctaatataattccggcttgctttatgatgtataacatgttgggcgaccttaattctactaaaggtttcttttccacaagcagaaatatgcaatccttcaacttcctttgctattgtttctcttttcttttcttgtcttttcttttcttattgagatggggtcttgctaagttgcccaggctggactcaaactcctgagttcaagtgacccccccatcttggcctccagagtagctgggactacaggtgggtgctgctgcatccagccctttaacttccttcgatcttgttcttattttcctttttgagacctcataaaacagcacatttgggggcagatagtatgaggaatgagaaaaaacaacggccaaacttgtgcaaaaatgaaaaatgtctgttcataaaaggactgaaacaagtctattgaatttggccatgatgaggtcatgatgtcgttggcaggatcaagagtttgtggaagccagattgaagtggggtggggtgtgaaatgagaaaatgggaaaatggaaccgatgtggatgactatgccaagaaattggattgagaactggggaaagggagatggaggtgcagggttagaggtggcgttttctgtgcctgtgtttaggaagggagtgactagagcagtttagcagttaagaagagagtgtggatacagaactgctccagcatccgcctgctgctactgcatgcccagctctgctccgtccagatcctgcctggctgcacaggcacctcctgaactcttctagttcaatgcatccttcttggctcccacttgctcattctctctgggtctgctgtcatcagggagaatgcttgccaaggtcattaagggttgattgacactaagacatttcagtaattcctggcatttggagttctgacacctaacactgtagcgtttggtttcacggctcttttattttctgggagcattccagtaagagagaagagagcctgatggtcaggagctgagtctttggagacacacagatctgagtttgaacctcaactctgccctttattagttgtgtgaccttgagcaagtcatcccactcctttatccccatctgtaaataaaatgagataataaaaatgccaaccccttaggcttatggtgaggaatgaagagagattacgtgacaactttgtggaaatgaagattttagaatgaaggcagagactgggatccctcccattcccaatacttggattaaaagttgcccaggtgcggtggctcatgcttgcaacactgaggtggaaggatcatttaaggccaggaactggagaccagcctgggcaacatagtgagaccttatctctacaaaaaaatttaaaaattaactgggcatggtggtgcacacctgtagttctagttgcttgggaggccaagacgggaggatcacttgagcccaggggttcaaggctgcattgagctatcatggcaccactgcactccagcctgggatacagagcgagaccctatctccagaaaaaaaaaaatcaaccaaaaaaaacctctgtcttttgggaaggacccctaggaagaaatggatgtttctcaggaaaagcaattaatcgatgtcacctagccccactctaggaccttccaaatgcctcttggtatctgtgttcttttcttggctcctggataataagtggttgaaataattacgttctaagtctttggcacccatctgccctcgtcctccatccactcgcttggtggagcctttgtcattgtcgacaataatatgactgaagtctgtgggcttttctaaccccacacatgatctataccaagtgggaagattctgtgggggccgtgctaagagagtgtgctaaaaagagagactattttaaaaaaccatcctaattttgtgaggcagaatgttgttgccatttttactttgtgctgcctgtcatccacgggtgtaaagaagggcacaggtatggagtagtctatgctcatggtgacattccaggcacatttgttgtccttgggatgtttggaaaagggggaggcaggtggaaaatttggccatgtctggccaaatctaggtgaaaaaataatgctttgctgtgaaagagtggagacttgggagcaatctctgggcgtatgtgcaacctctagttctgggtctctgaaggttaacgccctgtggacactggggactgaactggtttagatttttctgtctctttaatgggcaaaggctagagataatgaaggtgagttctgtgtgtaaattagtatttcaaattagcttctggaggtggaaaattcttttaaagaggagcacagagatcactcagtaaaaacaggagaaatcaataggggaagactggtgtgaattgggaaaggtctgcagagagcaagagagcaggttttttttttttttttgcaaaggtatctttgcactcctaccctgtataagtgagattttgcctggaccccatagctggtggccttgtaaaatcagaatcacacctttggaaagccatttggaagtacatactccgagccataaaaatatttcatacctctgaactagtaatcttccttctgggaatttatgctagggaaatcaatcataaagggggaaaagtgccacatgcatgaaaatgctgatggcctcatagcttttttcgtgtgttttttttttttttttttttttttgagacagaggcttgctctgtcacttaggctggagtgcaatggcgcgatctctgctcactgcaacctccacctcctggactcaagcagttctcctgcatcagcctcctaagtagctgggattacaggcacccacccaccactcctggctaatttttgtattcttagtagagatgggatttcaccatgttggccaggctggtttcaaactcctgacctcaaatgatctgcctgccttggtcttccaaaatgctgggattacaggtgtgagccaccacgcctggcccctcattgcttttaatattaagaatttggaagccacctaaaagactaataggaatggaatggtcatttaaattatggtatatttaatcaatagactgctatacattcattaagattatacttatgaggccaggcgtggtggctcacgcctctaatcccagcactttgggaggccgaggagggcggatcacgaggtcaggagatcgagaccatcctggctaacacggtgaaaccccatctctactaaaaatacaaaaaattagccgggcatgtggcgggcgcctgtagtcccagctacttgggaggctgaggcaggagaatggggtgaactcaggaggcagagcttgcagtgagctgagaacgcgccactgcattccagcctgggcgacagagcgagactccgtctcaaaaaaaaaaagagattataattatgaataccctttagaagcttgcatctgtctgaaataagtactttttatgatataagcataatgtaaatacttgtctgtacaattgactttttggggggaggggggaggggcaaggttttgccatgttgcccaggctggtcttgaactcctgggctcaagtgatctacttgcctcagcctcccaaagtgctaggattagaggcatgagccaccacgcccagcctattactgcttttcctctgctgggtttgtgtttggtttgttcttatttctctagttccttgaagtgtgagcttagattgtgtatttgtgctctttcagacttttttaaatgtttatgtttttatttgtgttagtatttatcttgaagaagagtgaaaacataattaaagaagtactggagaatgttttaaaatagtaccatcatagacaaaaatactaacctcgttatagctttggggatagatggggaaaacatgagaaaaattttttgatggctacaattgtctcttgaacgatgsaggggttagaggtgcttacctccttggcagttgaaagtccacaaataacttcaggctcctagaaacttcactactaatagtctactttttttttcttttttgagatggagtctttttctgtcgctcccactgacagtgcagtggcgcaatctcggctcactgcaacctctgcctcctgggttcaagctattttcctgcctcagcctcccgagcagctgggattacaggcatgcgccatcgtgtctgggtgatttttgtatttttagtagagatggggttttgccacattggccaggttggtctcgaactcytgacctcaggtgatccacccacctcagcctcccaaagtgctgcgattacaggcatgagccactgcacctggccaaagagtctactgttgaccagaagtctaaccagtaacataaagtccatcaacacatactatgtatgtcatatgtattgtatatcatattcttacaataaaggcgagctagagaaaagaaaatgtttttaagaaaatcrtaaggaagaagaaaatctatttactgttcgttaagtggaagtggattgtcataaagttttcatcttcatcgccttcacattgagtaggctgaggaggagaaagaagagaggttggtgtattagtctgttctcacactgctataaaggaagacccaagactgggtaatttataaaggaaagaggtttaattgactcacagctccgcatgtctggggaggcctcaggaaacttacaatcatggtggaaggtgaaggagaagcaagtatcttcttcacaaggtggcagaaaagacagagagagagagagcacaggaaactacacttataaaaccatgagatctcgtgagaactcactgtcgtgagaacagcatagaggaaactcccatgatccagtcgctttccactaggtccccccctcaacacgtgggtattacaatttgagatgagatttgggtggggacacagagccaaaccgtatcagttggtcttgccgtctcaggggtggtcaaggcagaagaaaatccatgtataagtggacccatgtaattcaaacctgtgttattaagggtcaactgtactgcgacttatatataaaataaagacagaaacatacagataggacctgaaaggaacatacagaaaatgagaacagttgatgtgttcatgtggtgaaaataggaatgatcattttccttgttttttttcagatcacttcattacaattgcagtgttcctttaagtcagatcctagctttgtcaatgaatggcttcagctttgtcatctgtgaaatgggtgtaataataatagtttgtaatactagcaactcatttccccccatgcttctttgttcttagcctttctatacatcagctcattcggtcttccccacccacctataaggtcggtatctacagacaggcaagggaacgtggaggacttgtcatagtcactcagagcaaatctgggcttccagatccacctacttttaccgtaaaggtgacagccttaaccacctctttgtaccatcttcttgcctcttctctactgaatctttctagatatgttgtaagaaatagaggtgatgtatgctccctttgggcctggcatttaggagaaattcagtcaacagtagctggtaatcaccattgtcattataatgtttgtataataaagcaataagaagaaaataacaaaaagtagagtcagtatcttgaagttcatgtatatggtgagcaaaactcacagccaatattttcaggcacatgcattcttaaggttcatctttacataacagcatctgtttcagatttcctttcttacgtgggttaaatatacctcctgcaaggatgtttataatgtcttacctctttttagcactttgtccttctttcaaagcatattcatatttatttttttctctcgttaattttgggagacatgtcagtggtccccccattttacagatctgtgatctctcaccttttttggattgcatacccctattggtgaaaatttttgagcacatacctccaatacctgcatatatgtttaattataaattatatgtgtggattgctgacagattgtatttaaaagcatgagatgatgaagatgaaataagcaatgcttcaaatttattttccaatatggtttatttaatagcataggaaaccttttttcctctcattaaaatatcattactggctgtattttccatggcagccatcttagtagatctgtttttgttattttcaaaatcatgatttaatactttgtgatagagtaattcacaggtctggttttaattcacttatttttggtttcaatactggaaaagataccccccaaaagagatgtagatccaagtagaagaaattcatagttggtggtgcttaataaattatgatactcgcttcgcgaagccatccatgtattatgcaaaagtttttgttgaaattcagctagtaaatttccatttctcatgatgccagtcagttgctcttgcaaactaactgaaaggtgatgcatttcaatatttttaacaaatgggcccaaaacctgctgaaactcttcatatggaaggcgtttaaaagcctagaaaatctgtttccaagtttttcaagtgtgaacatatgagtttttataaattaaattatagcattttcagccacaaatcattaatcatagaaacatttccaaacatccatttcaaaatgactctctagtagtacaagtattcttttttattggaaagcattagtttctcattcatcgtttaaatgtcatctttaccttgaggtaacaaattaagtacgtttattttttctgaaaatatttatggatgccataggctcttgagggwtatctgtcatccaagaataggccattatattttgaacttaaaaaataatgtataatttattattaatttacagcccttcttaagttttttgacacaagataaccagcaaacttctgggtatttccaggggatttaggtcactgcctattttactaaaggagttttttgacrgtatggctatattttaaatatctgtgtttttacgattgatatcctggaggctttcgtgccctttgctgtagtaacttgctaggaatatagagtgaatgaaattagctgtgcacctgtctctgtaagctcgccccaaaacccttcttttatttcagtcaaagcatccattccatcaggaggcaccctagacgtttttcccctcgaacaaggttttcacgtaagaactcatttagttcagaatataaatttaccgtagtgacaaaaactgcaattacttttgcaccaacccgatcattgactcacaaaagtggtattttgtatgtgttgtaacagagactgaatctagcaagtatcacaggctgaaacgtgggaaaaacccttttccctgagcacagcaaacctgccttctgtgtgcgcctttcttaagtttctgtcttcaagttgtcaccagtgttttcaatacattttccaaaagtatttgctgacaaagaaatgcatttagtttattgccagattatgtttttgtgtaatagtcctgctatcttggctgtaggtgaaagcataagcatttccccaacatgacttcttatttatttattttttgttatactttaagttctagggtacatgtgcacaacgtgcaggtttgtacatatgtatacattcgccatgttggtgtgctgcacccattaactcatcatttacgttacgtatatctcctaatgctatccctcccccctcccccttttgctattgggtggagaactctgaaagagaatcacaatgcttattgtttagtttgggggaaatttggaaggtcctgggattgtgtctagtagggtgttaaatatcattgaaaatattacagatacttgccttctatttctgtatggttcattttaaaatgtcattcaaaagcatgatatattcttaaggtaagaattagtgttactggcagtgggtctgcatccatatttcaatacctttctccttttcttttgagacaaggtccatgctgttgcccaggctggagtgcagtggcactatcataattcattgcagccttgaactcctgggttcaagcagtcttcccacctgagcttcccaagtagctaggactataggtgtgcaccactgcacctagctaatttaaaaatttttttcgtagagatggggtctcactgtgttgcccaggctggtctcaaactcctggcctcaagtgatcctctcttcccggagtgctgagattacaggcatgagccaccacaactgacctcgatattcttcttgataattccttttggacctatatcggattgtcagtcttttaatctcagatagtggctccagacaagctcccaacaggcagaaaagcgtcagctctgccctgtgaggttgcagcttgtgtttaccttacgactgtcacccccagggcacatgctgtgtgcacaaatctttatgtctcttacctgttttatgaggacttgtttggttaaagctgaaccataagatctgtacagtcactacctgggcatgtgtaaactgcacattcagcctcgggctgtgatccaaccctggaagaaggtgcccctgctgcctcctccgggactcactcagggagcaaattgtccttccgacatgggacatcacccccaaaagaggatgtcaccaccagggcatgtgtttattgtggttatacccgatatcctttttttgttttcagatcaataagcattgctataacagaagttttattataggcttgcaaccttttatctgcgatcctgaaactcaaaaaaaaaaaaaaaaargatgaggccgggtgcagtggctcatgcctgtaatcccagcactttgtgaggctgaggcaggcggatcacaaggacaggagtttgagaccagcctggccaacatgatgaaaccctgtctctactaaaaatataaaaattacctgggcacggtggcacgtgcctgtagtcccagctactcgggaggctgaggcaggagaatctcttgaacatgagaggcggaggctgcagtgagccaagattgtaccactgcaccccactgggctacagagtgagagtctgtgtcaaaaaaaggtggtaaaacctaactgtaatgggatataaggctatttatgacgtttacttgtctcatttaatgtgactgtgcacacatttcatttcaggaatattgacatgttaagttgggatgctgacccagacccattagagagtgttagatcatacatatatgtgtgaaaggaaaatacaaccttggagccctcaacttactctgccaaaggggaaagtcaagctgggaacagtcatgcaaaccggcttcccattttgttcctaaattcataactgcaaagataaaaggctgcatacctccctcacgatttattcatgaggaaattctttgtgggctccaatatcttttaccctaaagcagttctattgagtttcaccctgacaatgtaaattaacagtttatcttcacaggtatgggacaaaggacagatttgaaatcatccctccactcatctgagccatatgcctgtctgactgcatcctctatgtttattaaaaatgctctgtgtgcaagacaacttgaaattgactattcttctgccctctgctttcccatgtaaaatgcagattcagtgaccactgatcaaagcctcaaatgaatgcaaccacgtacctcttttatctacttyattagtttgttttcatgctgttgataaagacatacccaagactgggtaacttacaaagaaaaagaggtttaatggactcacagttccccgtggctggggaggccttacaatcatggcggaaggcaaaaggcacatcttacatgacaagagagaataagagccaattagaaggggaaaccccttataaaaccatcagatctcatgaggcttattcactaccatgagaacagtatggggggaactgcccccatgattcgatgatctcccacgggatccctcctacaacacatgggaattatgggagctagaattcacaatgagatttgggtggggacacagccaaaccatattacctactcttcctttttttttttttttccttcgtctcttccttactgcctactcttttctctttaaatatagacgtccccaaactctctttggaaaaaccatgaatcactgatatttcctgtggttttgtgttcctttttcctgagcacatcctaaaccttggccaaataaatctctaaaataactgagactcgagtcagtcattttctttggcttacataggtacaggtaagaatttctacagctcccaaagaactctgattctaaaaaatttctacagctccccaaattctgattctaaaacccagtgtgcccaaggttttggatacaggaccgtgaccctttccacagtaccatgaattgttctggcattccccagggcgagttgttgagggaaagagtcaaattctgtaagatatttgaagagatttgttctgagtcaaatgagaggaccatgactcttgacacagtcctgggaggtcctgagaacatgtgccccaggaggtctggttacaacttggttttatatgtttcagggagacataagacatcaatcagtgcatggaaggtgtgcattggcactgtcctgaaaggcaggaccactcaaagctgaggagagcttccaggtcataggtagattcaaacattttccaactgacaattggttgaaagagttaagttattatctggagacctagaatcaatagaaaggagcatttgggttatgatagrttcttgtggaggtcaaggtttttatcatgcagatgaagcctccaggcagcaggcttcagagctcttattggacataaaagggtgccagactcttacttaattctctcctggatcaggaaaaagacctgggaagggaagaggattctctacagaatgtagattttccctacaagagatagctttgcagtgccgtttcaaaatatgtcaaggaaatatattttggggtaaaatacttggatttctttcagggcctcccatctatcatgttggtatcttactgctgcaaagaatcttttttgtcagtcttcagatctctgttttacttttaatgctggtcacctgtgccttcccaaaggaggagagtgtaagaaggcatgtctgaccacctaattcccatcatggtctcacctagtttttcaggtttctttggaatssccttggccaagaagggggtccatcaatcagttggggggcttagatttgatttttgatttacagagtgtaccccacttttgagcatataaagggtgacatgaaagcccacaggatttgttacttgctccaagtcacccagcaagctgaaaacaggaatctgaaatgagactcggccacagtctgctactgcggctttcactgaatcacatcttgttgtctgtctgaggagaagattctgggtctagtttaaaactggagctttccaaagagaacatgtatatcagtggccttctgccaagagaagatttcattcattgccagcatcagctgtgagaggcgatgtcagggagtggggaagaatctagactcacaggatgttcaagttagaacatttccccagtggattcctatctattttcactcatccattcaacaaaatattcaatgatcctatgctaggaatggagctgatagggtttggctctgtccccacccaaatctcatcttgaattctagctcccacaattcccacatgtcttgggagggacacaatgggaggtaactgaatcatgcgggtgggtctttctcgtgctgttctcgtgatagtgaataagtctcatgagatctgatggttgtataaagaggagtatccctgcacaagctctctcttttcttgtctgccaccatgtgtgagatgtacctttcaccttccaccatgattgtgaggctttgccagccatgtggaactgagtccatcaaacctgtttcttttgtaaattgcccagtcttggatatgtctttgtcagcagtgtgaaaattgactaacacaggagctagctaagcccagtcaagacaaaagtctgttgacttctgcctcccctgaaggagtttgcagtttactgggacggtagtgcaaatttcctgcataagattcatttgtaacctggaaaatgcttgtgagttcaggggagaaggtgtcccctctggagagagtgtggtgatgtgttcatagggaaagtagctcttaaatggaaacgtacaggttgcctggggctttttcaggggagctggcttgtggaaggcattccagctgagggaacagcatgagtaaaggcatagtggctggccgagagactagatacatctgctgtaaaccaaaaataaaattctcagtcctcccccagccacatgaatggaccacygtcctctcggccaagggcaatcccaagttaacctgaaaaatgagttcaggccatgatagggaggggaagctggacatacctcattatacccttctsccttttcagaattactgacagagcagactctttaattctgaaaagaagcatttacaatctattctccctgaagcctgctacctggaggcttcatctgcatgataaaaccttggtctccacaactccttatcacaacccagacattcctttctattgataataattctttcatccatttaccaatcagaaaatctgaatctgcctgtgacccgcaagcccccgctttcagctgtcccaccttttcagatccaaccagtgcacagcttgcatgtattgattgatgcctgttgtctccctacaatgtataaaaccaagttatgggctaggcgtggtggctcacacctgtcatcccagcactttgggaggctgaggcaggtggatcatttgaggtaggagtttgagaccagcctggccaacatggtgaaaccatgtctctacaaaaaatacaaaaattagctggacatggtggcacatgtctgtagtcccagctacttgggaagctgagacaagagaattgcttgagcctgggaggtggaggttgcaggttgcagtggatggcaccactgcactccagcctgggcgacagagtgagactccgtctcaaaaaaataaaaaccaaaaaccaaaaacaaaaaaacaaaactgagttctggactgaccaccttgcgcacgtgttctcaggacttcctgaggctgtgtcacaggccactggtcactcatatttggctcagaagaaatctctctaaatattttacagattttgacttttttcaatgacaataatttggcacccaatatggggccgctctttttgccaacactgcgtatctcagtagctcggtactattgaccgttcaagtgagaatragagaggtaggagatgacactatctaggctggcagaggtcctgccatcccagattctgtgctgagaggtatagatttccaatgcagaggtagagaacatttttgagcaggagagggragagtttttctaaaaggactctctctctcgcactcctaccccctgcagaaatgccttctgcaacattcctgctgggtggctgagcggcctctgtgtgaccacttctggggacattatttggttaacatagaaattaatttcttttatatagctcgtagtttgtaacctccattggttttaaaacctggcattttagggctgtctgaacaacttcaatctgttctttttttgtgaaatgggtgcaggacacatcagtttaattcattctgcatcctcatttttcacacgagttgtcttattattcttaactattattaaaaggaatgataaaaagtaattaaccatctggaacagattcatgcttcctattagtcagggtgtccattatgaaatctcctgaaagttcagccttagaaataaattctccaagtaggtggattagctaatgaatttttcttctccaaagatgagtgtactttcccagcacagccagcactcccctccactgctcatttatcaaagggggaaaaagtagaagtgaaaaatagaaatggcttgtcaatataatttactgtataaaagctataggtttgatatggtttgtggaaggtttccgcactatccttctccactattatttatggttttagtgtgacgctgaacctcgccttcaggaggaaaatgctgtattcagtcactggtctcttcagggtccctaggaaatgcccccagtcccttccaggccactgtggggatgctggagatggatctgctgcagaacgaaccaacaggtgatgccagaagcctaagtttgtcttgtatggatcccgtgatgagttttaggggcacttgtaatttgacaaaggaagaattatgttgcaagtgggtaaccgttctgtgcatcctggattctacgaatcactgcctaccacagcctcctgggcattgacaggcagccttgactcctggaagaccatgtgacaccatgagccagctgtatttgacctctgcattggccctttatgcttctaaacccaaatcatcgctcccctcggccgtatccatggcctcccgccattgctaataccaatgaattgagacgggatggatcagggaacccaaaggccaccctcttccttaatggctgcccttgcactcacatgagctgagacccaaaagtcctttctcagagagaagctgcttcctgggagaattcctcctgggtatagaacatagggccaggcctcccagggccaaggggctgactcccatattatctgtgtcaacaagaagcatttgcttcttgcaaatactagaagatctgaagctgttcactgcactcagtattccctaagtgcaatgctgattcatggtcaagagtgaactcttcatgcttcatgaaatcttccacggttttgtattatcctgagaaagctcagctcaagtgcagtttctttcgtgaagccttgataatgcaggttacaagtcagttctatgcaacaaatayggcaccttttgtgtcctaagccccacactggactctgaggatctaagagtaaatgagacatgtgtccatccccaagaagttttcagtctgctgatagacacatgtatagaaaaactgcaaataaacacagtaagagaggtggcaggaatatatcacagaaacctggaagaaaacattaccatctgccctgaatgcttggggaaatctttacagagaggatgatatttatgctgggttttgatgtattcataggagtttgcaggaaaactgcaaataaacacagtaagagaggtgtcaggaatgtatcacagaaacctggaaaaaaacattaccatctgccctgaatgcttgggaaaacctttacagagaggatgatatttatgctgagttttgaggtattcataggagtttgctaagtagaaagtaagtgaaggagtggggaagacatttgacgcagaaaagacatacaaaagcatggcttgaaagcctacagggtggggcatagtgtatttctgatgctcagggtatgtgtatatgggggatgaggctggagaggggacctcttctagttgtttctaatgatattgcaatcacctaagaccccaagcctggcacaccgtacccactggagcggggagacctaggttgagttcatggggtagggctggagcagggagctcttaccttcagagggcctctttttcatcctaaatctgaatgtctagagaattccatacccagaaatgtcaaaggcttggatcaaagctgcagatctctgagtcagagggagttggaaaagaaggagcaacagaagcaagttgttccagccaggtttgaatgggggatggcactttcctgtttcatgcacgtgtgccttgtcttttcaaatcaattatattctacttgaaggcaagagaaatggtttaagaaatttgttaaagtattatgaaaacatagagaagtcgtatcaattgcccaaggtgatagagttagcaggggcagatatagggttttacgggcacttggaaacgaagcactggtccctgtcctgtgtctcagatctcatacacagtttgtgcttagtggacagtgtcacatattaagagaggggacataagccaatggaagtacacacagaagatggagaccaacagatcttggtcctgttttgttttttgtttttttgtttttttttttttgagacggagtcttgctctgtcactcaggctggagtgcagtggcgcaatctcggctcactgcaagctccgcctcccgggttcatgccattctccttcctcagcctcctgggtagctgggactacaggtgcccaccaccacgcctggctaattttttgtatttttagtagagacagggtttcacggtgttagccaggatggtctcgatctcctgacctcgtgatccacccgcctcggcctcccaaagtgctgagattacaggygtgagccaccgcacccagcctcttggtcctgttttatggaaaaacatctattaagggagcagagaggatgacaaggtcttgggtaggggatggggagagggatcactgtcatcaaatatttgcaggaattttatatacaaaaaggagttgctttgtcccatgtggacttggaggccatcctggacttgcaatagaagttgcagtgaggctgatttctccctaactgctggtgctacctgaaagttccatgggctgtctagaaagagtaagcctcccaggacgagaggcagaaacatcatagatattgtcaaggaacttcttcctcttggttggtgaccccaccaaatgatttgcagtgtctcttccaatttggagatgctgtacatctcttgacacttctataattctgccattctccctgactcccaggagagcccaggatctgtgaagacatcagaagttgagtgctgggccgactgaaacacacagacctttgctttaattattccactgtgtgagatccatttgccaagggaaatggggaaagtatttttagccaaggcatttgcttttaggggactcattctcctagaaatattctactcctcctcttttatgctgtaccttattattccccaggagttttactccttgagacactatttggattttttaaaatctttttttaatctttttttttttgagacagtcttgctctgtcaccaagcctggagtgcagtggtatgatcccagctctctgtactcctgggctcaagtgaccctcctgcstcagcctcccaagtagctgggaccacaggtacatgccaacacatcctgataatttttatttttatttttattttgtagagatggaagtctcactatgttgcccaggctggcctcgaactcctggactcaagcaattctcttgcctcagcctcccaaagtgctggtgttataggcatgagcctctgtgcccagcctctttttcatccttaaactggtttgattccaaaagaattataaacccaggtgttaaatttcaacatatagagatgacatcctattgatcgtcacascggctcatcctcctgagtgggcagctgacttcgcagtgcagggattcccctatgtgtgcactttggaagcccttggacagttggagaagtccccatgctcaggctatactccgatggattatatcagaaaatctgggtggggtcaggcactagaggtctttaaagttgcctggatggttccaacgtgcggtcaygtctgagagtcgctgcttgagatgcatcctggattctgcctggcaggactcatgggcccctgttccctttcggagcttagagggattgagcaaagccactttcagtttttccacttgccaggcaggtgcttgaggaagttatttgactgctcagagccaccggagcaaaaatactttccccaatttcccttggcaaatgratctcacacagcagaataactaaagcaaaggtckgtgtttcagtcagcctagcactcagcttctgaggtcttcacagatcccgggttctcctgggagtcagggagaatggcagaattatagaagtgtcaagagatgcatagcatctccaaactggaagagacactgcaaatcatttggtggggtcaccaaccaagaggaggaagctccttcctcygtgaaatggagaccctggaaggttggcttcgtgtgccttgaatccctgaggtagtgcctggcagggggcttgccctggtgcccttggctgtgacagtggtggtgatcgtgacaaccgtaaggaacactggctgggcattcttctgtggaggtgtagcctctgtgccaagtgtgtctcagctttttgcacgtgtacttcatttattcctcttaggaatcggaggtggtagttactattattatctcacccttttcacattgccacctccatggaaratgatggtgtttctacagcatagtggagtaaaataagacagctgccagaggtgacgagcttgggccctcttcccgggagccgtgagcactgagggggtctacatcttgggcaccccgattacctgagcgtrcacctaggaggctgtgtttctgacgcgtgatgatggtgatggtgaacaagaatgtcaggatgaattgccctgttggtttcttcttttaaatcttaattgatttttattttttttgtaggcgagatcttgctctgtcacccaggctggagtgcagtggtgcgatcatagctcactgcagcttcaaactcctgggctcaagtgatcctcccacctcagccttctgagtagctgggactacaggcatgtgccattttgcctggctgatttttaattttttttcttgtagaggcagactgtcaytatgttgtccaggctggtctcaaagtcccggcctcaagcagtcctcctgcctcagcctcccaaagtgctgagattacaggtgtaagccactgtgcccaacctgtttcttatgtayatgtcacttgtcattggcaggcaaattggagttgttcacttggcacaatttcaattcttgggaactattatgggttgaattgcattttccccaaattcctrtgttaaagtcctaatccccagaacctcagaatgagactgtacttgtagaaaagatcttaaagatcttaagggataattaaattaaaatgaggtctttagagtgggccttaatccaagatgactgactggtgtcctttttttttactttctttttttttttttttttttgagacagggtcttgctctgtcacccaggctggagtgcagtcgcgtgatcttggctcactgcaacctctgcctcctgggctcaagtgatcctcccacctgagctccccaagtagctgggaccacaggcacgagccaccaagcccagctaatttttgtttgttttgtagagatagggtttcactttgttgcccaggctggtctcaaactcgtaagttcaagcaatccacccacctcagcctcccaaagtactgggattacaggcatgagacaccacacccagccgactggtgtccttatgagaagaggaaatttggacacacatgtgtgcacagagaggaaagaccatatgaggttgcacaaggataagacgggccatctgcaaaccaaggagagaggcctgcagaaagaagcagtcctttgggaggctgaggcaggcggatcttgaggtcaggagattgagaccatcctggctaacatggtgaaaccctgtctctactaaaaatataaaaaattaactgggtgtggtggcgggtgcctgtagtcccagctacttgggaggctgaggcaggagaatcatttgaacccgggaggcggaggttgcagtgagctgagattgcgctactgcactccagccttggccgcagagcgagactccaaaaaacaaaacaaaacaaaaaaacaagaagcaatcttgcagcactttgatcttatgcttccagcctccagaacgatgagacagtgaatgtctgttgtttcagccacccagtctgtgcaattttgttatggcaatgctagcaaacaaatacasggaagagaactgtttgccacttgcaggaatttacctttagagcctccttgggttttccttgcctctgaaagagtgggtcacaaactttagtgggcttgcaaacacctggaggtcttgttaaaacctcagtgatctggccgggagcggtggctcatgcctgtaatcccagcactttgagaggccaaggcgggcggatcactaggtcaggagatcgagaccatcctggctaacacggtgaaaccccgtctctactaaaaaaatacawaaagttagccggcgtggtggcaggcgcctgtagtcctagctacttgggaggctgaggcaggagaatggcgtgaacccgggaggcggagcttgcagtgagccgagatcacaccactgcactccagcctgggcgatagagcgacattccgtcccaaaaaaacaaaaaaacaacttcagcaatctgatgtttccatgtgtgggagcgagtggggcttgtaaatttgcgttttctggcatcttcctaggtgatactgctggtcttggggactatcgtttgagagctactgctctggcacttgcaagcctggaggtggctctcagcaggccctcctattagctttttgaacattttgactttgagagtgaggggagagcatgtggattagcctgctgggggcagctgatgcttccagttgtgccttcattcctcttggacctgctctctaggggttgagcatgccgcacatgctttctttatcataggccctcttagtttgacagctgaaggacacaaccctttatttagtcttcggttcattctccctgtgttttttgggttcttcttggttctagtcttatataggcagatacatttctggggttacctgggttgtacctgagggggtgaagacagtcacgttattgaacctactgtaaaaatgtaataaattctagaacttccataccctccacartcctagtgctgagtatttatgcaaaggaaaggaaatcagtgtgtcagagggatacctgcacccctgttcattgcagcagtattcataatagcaaaggtatagaatcaaactaagtgtccagcaacagaggaatggataaagaaaatgtggtgtgtatgcacagcagagtaccatttgaccctaaaaaagaatgaaatcgtgtcatttgcagggacatggatggagctggaggtcactatgttaagtgaaataagtcgggcacagaaaagaacatattgaatgttctcactcatatgtggaagttaaaaaagtcgacctcatggggccagagagtgragcgatagataccagaggctgggaagggtgaatggcaggggtagggktcgtagagaggttggttaatgggtgcaaaaatacagttagaaggaatacattctaatatttgatagcagagtagggtgactgtagttaacaacaatgtattgtagatttccagataactagaagaggacttgaaatgttcccaattcatagaaatgatcaacccttgaggtgatggacaccccaaaaccctgacttgatcatgacacatttgatgcatgtaacaaaataccacacgtamcccataaatatttatatatatatatatatattttttttttttttttttttttttgagatggagtctctctctgtcactcagtctggagtgcagtggcgcgatcttggctcactgcaacctccgcctcctgggttcaagtgattcttctgcctcagcctcccaagtaactgggattataggcgcatgccaccacacccagctaatttttgtatttttagtagagacagggtttcaccatatcggccaggctgctctcgaactcctgacctcatgatctgcccgccttggcctcccaaggtgttgggattacagacgtgagccactgtgcccagccagctatataaaatattatgtatcaatattttttaatgtgagaaattcttaagaagatctttatgttgataccacataatgatagagtgtagagaggctaaatttgcacaaggagggcaaggaaggtttgacagaggtggtggtatcagagctactgtgtgactgattagcagagattttcttggcagagaggggaggcccaaagtgttctcttctaaggcagcagtatgtgcaaaggcacaaggattggaaacaaccagcctctctaggggaagatttaaggagataagtgtggctgatgcatgaggtccatgggtggaggcgtggtgggagctgagaaggaagggataggttggtgccacttgtgtctactgggagttcagtattaatcttttaaggaacaggatgtattagtttcatgctgctgctgtaacaaatggcttcatagtggcataaaacaccacacatttattcttatagttttcgaggttagaaatctgaaatgagttttayaggactaaaatcaaggtgtctgcaaggctgccttccttctggaagctccaagggtgaatgtaattcattcctttcctctcctagcttcyagaggctgccagcattccttggcttatggccgcatcactccagtctctgcatctgtggctgcatcactttagtctctgcatctgtggctgcatggactttgttactttgatcctcctgtatacctcttataaggactcttgtgatatcatcaggcccacccagataaatccggcatagtcccccccatctcatgagccttaatttactcacatctgccgatatggtttggctctgtgtcccaacccaaatcttatctcaaattgtaatccctatgtgtcggaggaggggcctggtgggatgtgactgaatcatgggagcggacytcccccttactgttctcatgatagaatcctcatgagatctggttgtttgaaagcatagcacttcccactttgctttctctatctctctcctgctctgccrtggtaaggcgtgcttacttccctttcatctttccccatgattttaagtttcctgagcttctgyagtcatgctttctgttaagcctgcagaactatgagtcatttaaacctttttcttcgtaaattacccaggctcaggtagagctttataggtatagagattggactaatacatctgcaaagccccatttgccatattgggtaacattcacagtttttgggggttagaatgtggatatctatagggggtcatgattgagcgtattgtaggggaattgaacaattcaactctgcaaggggagagaagtgcaacctggaaggccagctctgctgctctaccgggttgcatgagggaagaggagagcctggtcccaaatattgtcactggagatgggcaggwgatggtggcttgaactaagagggaaaaaaattggtgagaatttagtaaaggaggctgaagacccaggaggcattgagactgactctgaggtttaaaatgctgtcattttttaatggtgtcattaaccaggagaaagtgtgcagagcctccagtctccagttgcctggcatacttttcttggtctttgcaacaatttcaggaatccttccctgacatgcaaaagcccatccccgaagcaacgtgctttccagttagcacatgctgcatccctgtgcttcacagtgacttgcctcactccgtttgctaggctgcaagtttctgcagcaccatgcaaggtgcctgtccaagccaggctctggttctgtcgagctccccattggtatataaagatgtaggtgtcctttgcgagctgcgcaattggctattgccaggatgcccttctcaggctccacgccttcctggaatgagccttggggttgagtagttaactttgatatctcctgttaagggattttctagttttttttttttttttcttctaggaggatatgtggtttttaacatagacataaataagtctaataggtagaaatgactttgaaataattcatcaaggaggaataattcagctagaaatagcagacaccagttttcaagccttcttgcctgtgtattttcagaaatgtgctctcctttgagatatttctctcatccatttcggtaaatatctgttgcgctcatttgctgatggatggtgaacctgctttgtctcctgtgtgtactggctcttttattcccctttatcctgcttattccttacagccatggagaacagcaggtttcttattttattttattaagttctggggtacakgtgcaggaggtacaggtttgttgtacaggtaaacgagtgccatgctggttttctgcacctgtgaacccatcacctaggtattcagcccagcatgcattagctatttgtcctaatgctctccctccccccacctgcccccacccccacttcccagcaggccccagtgtgtgtttttcccctccctgtgtccatgtggagaactgcaggtttctttacttaaaaacagggcatgggatgttgaaggagactgttcctttcacttgggaattctggtttatgtcccaaagctgagagcaataggggcgtgtttgccattttttcagagggatgctggatgcctctgtggaggacctaccaagggattcacaagattcgtcctgcagcctggatggcacttctctctaargaaaagatgagttaatggaggagaaagttggagggaagaatgggtgtttctttttccctcccaacaggagggactcctccccaggtcaaatggggaaatttaagcaaaccccccatacagattgggatgctggctaggcatggtggctcatgcctgtaattccaacacactgggaggtcgaggtgggtggatcccttgagctcaggagcttgagaacagcctgggcaacatggtgaaaccccgtgtctacaaaaaatacaaaaaaaaaaaaaattagccaggtgtggtggcatgttcctgagtcccatccactggggaggctgaggtgggaggatggcttgaacyggggaggtggatgttgcagtgagccatggtagcaccactgcactccagcctgggcaacagaatgagatccatctcaataaataaataaataaataaataaataaataaatattaaaaaaaagagattgggctgcctgccagaggaggctggcctctccttcactggctgggtgctggctgaactgtggcactcataggtccatcttcataggcgagagcagggtttgatgagtgcattcttgggatcacctgaaatagggaagaaattgatgtgacttctctggacttggaggagcctcggtgaaggttggggttgtgcctgtctcctgtctcctgcttggggaattctgagggcaggagtttggtaggcaggaagggtgggcagcaatagagtggcctacatggcttcytctagcatgaccagcagatgtgagacttgaggcctcatggaggcaggaacagggaggaattaggctggctgcagaggggatctggcactgaggctgccaagggcaggttcaataaaagtccctagaggccagctggagagcttactgccatatcagggatccctgtagcttggaaagcctcacagcagggcctgggagaaccctcagccgggccctttaacagggctcatctttgaccactgccaagaggtaacaaaggaaaacaccaggcaagcgtttaagccttttgtggccaggcatcatggctcatgcctataatcccagtactttgggaagccaaggtggtaggatcacttgaggccaggggttcgagaccagcctgggcaacatagtgagaccctatctctacaaaaataaaagaaaaataagctgggcatggtggtgcacacctgtagtcccagctactcaggaggcttaggtgggaggatcatttgagcccaggagtttgaggctgcagtgagctatgattgcgccactgtacttcaggttgggcaacagagcaagaccatgtctattaaaaaawaagcctttgcttcccttgctctgtcttctcccctcttctctcrtctgccttggtcttggaggaggcagtagaaggagtaggggctggaggaagtatggagggccatgccactgctcatctgtctgcagaggtcctcgacccacacgtggggcctagactggggaggggcaggaagccgagaactggacatgaatggaagtgttcacaggaggctgtgccacactttgtaaatcctaaaattgrgttgtagtttcctaacttattttcctcttataactgaaagtgagtggagggctaagggattgtcatctggctgagaagggagagctgtgatagcatggctgrgggaggtgatggaagacggatggagcccttgcctttgtcccccacagataaatttgttgtaaaacctaacaagagcacaaagcaggggatagactcaggaagagagattaatacactctctgaaacgctttgtactgatttacaggctttaggaaatattttcatgagtgtgtgtgacacctctctctctgtctagcacatagtattcatttataaacctacctccctgctgccctacacatttaataaatgtgctttaaactcatttactcacccccagcaaccttatgagtagtyactatttttagccccgttttacagagaagcaactaaagcacagagagattgagaaacgtgttgaagggtgcacagcacatgtggaggaactgtgatctgcactcagaccttctagtccctggggtatctcactctccccccttgtatctcctctatctctcaattttttattatagaatgcagatcacgaggtcaggagattgagaccagcctggccaacatgatgaaaccccgtctctactaaaaaaataacaaaaattagctgggcgtggtggtgggygcttgtaatcctagctactctggaggctgaggcaggagaatcatttgaacccgggaggcaaaggttgcagtgagccgagattgcaccattttgccccagcctgggcgacagtgcgagactacgtaccctccccaccccmccaaaaaaaaaaaaaaaaaaaaaaagaaacgaattttctaaacatatataaggtaaagagaataatataatggacttaatgtatgcatcacttggcttcagcaattctccttttataaaatgcattccaaacccttaccctcttctgcctctttcagcaaatttgtttgaggtggtggatgtttgctgagtggacggatgaaaaaaaatagttgaagagtaattgccatttgatacagaacagaagagcttagctttggtttaagctgttcatttccctcccacagtctgaagttcagctgcaggaaaaaaaaataaaaaagaaagaaaagtaatttaagtaatttaaattctgcctgctgacttagttttgtcctcatcttatctgaccttatttaatcagagaaaaaaaaaagaagaaaagaaaagaaaaaaaaagactgggaaagcgttttctaggaatttcatcatgaccctttaaacacatcttccatttacacttatataattgtttcatacgggatagtgttaataataccaaatttcattcctaaagcaagctgacaaaagcatttaaagacttgctcattccamatgtgttagagcagctgagaatcacgatctggtgccagttcatttgctttcaatacttcctgcttttgggtgctgcatattttctttacaatagcccatagttagggccatatccatacaccccaactccagattcctgtcacgcgccttccagtgcaagaaatgatcatgctttagggtgcacggggcacagtctagcattttccttgctttccacatcagggtgatgatgctcagagatgtagaagagctcccaaaggggtggcactgaccagtggccacgtggctccctgggcctgttcatccatcccggtttgttctgagataacctcatgtccaggaaacagccttggctaacgtgcctaggagcagtttttgaaagaatctgagctcacggaaatgaagtaaaaaatctctggcactcattcaggttttttatttaagatttattaaaggataatttacaggcgataacattcaccctttttgggtgtacagtttgatgagtgttggcaatggatatgtagctgtggatttaccaccacagttaagatgcagaataatcccattttgtggtcagtctccaactcatccttagcaatcactgatctgttctctaattcttcctgtcttttttatttagtggtggggacagggtctcactctgcctcccaggctggagtgcagtggcacgatcacagttcactgcagcgtcgacctcccaggctaaagcgatcctcccgcctcagcctcccgagtaactaggaccacagatgggtgccaccatgcccagctaatcttttaatttttgtagagatggggtctccctatgttggccaggctgatctcaaactcttgggctcaagcagtcctcctgcctcggcctcccaaagtgttgggattacaggcatgagccactgtggccagttgtcccctatttctatggttttgcttctctagactgtcatacattggaaatggaatcatgcagtatgtaacctttggggcctggcttctttcacttgaatgattttgatacatgctattccatgtattgggagtttctttcttttttactgttaagtaatttccgaagtatggatggacatttgggttgtttccagtttgggggaatcatgaataaatcttctattaaacattcatatacagtcatgtgaacatatgttttcatttaccttgggtagatacgtaggaatgggattcccaggtatcatgtggtgagcgtatgtttcactttgtaaaaaaacgccagcctgttttccaaagtggctctactattttgcattctcacagctatgtatcaggcagagttcaggttgctccacatccttggtgacacttggtattgtcaggtatttttttaagccattctagtaggtgtgtagatgtcatgcaggcttttgtacatggaagggcaggaatgtcttgggggaaagtcagcctcagttactgctcccataaagctctttctcctgcagcccttcaacctgcgcttcagacaatcgacagcaggattccctgtttagattcactttgtgccaacaacctgtgaggcttggcagcctaaggcctggatgccctttggtgagaggcaggcacagtaacagggcagacagtgaccaatatgacatgaggaggcctgagatgatatttcttctctgatacttactgctcttgtaacatccccacatcatttaagctctatgtctgtctctcctgttatgtagaagatatagagttaatcatgtctgctttttcaccctaccggagagcaaagaagagccttgaaagttgaaatgttcaattcagagaagaaagaagagagcacgatcatttttattgcttttgagttgctgccagctaaaacctcaggtccaaagtaaaaacactcctgttattagcagtgaaggttgacaagactgtttttcatccatcttattgtttttttaacaattttatatgcatataattccatgataatgacataagaactgcttggagaagaaactgcatgttcttttgtgatttttaatataaaattctctttgggctaaggcaaccccttgtaatcactcacctcatttccctgataccagttctctgaaatgttattgtagaccttgctccaatttcaaacgctgtcaactcttgcacataaaaacagttgtttatatagtttgtggattactccttttccctcttgaactatttgtttcactgctcaatgctattcccagttggttctgacaggagaaatggaagataatgaaatatcggctagattattttctccctggttatagctattgtgaaagtttggctaaaatgtagtatttttgtctgtctggagatttgagttgttcttgctatctcccttttctctgttagcaaagtcagcaaatggttgaatcaaggtagacaatgaagtattcctgtttgtggtctccagtttctgtcctatagacatcacaaggttatttgcagagtttgtatgaaacaatgtttttggagcctaattctcatttgtactttagagccaacagatgtttcttttaagaacataggaaaagagagtgagataaagagactttgrctaagcattcttttgatcagccatgaaaagtttgacttttaactgttggtcaaatacaatcatggcatttccaaaaatttttctctaatgagataatgtgtgtgtgtgtgtgwgagagagagagagagagagagaatgagagacacacagaaagagaatgtgaatcataggtttccactgacctgttttaattttagagactcatttcagggatgtgcacccacagaaaaatgcctggcatctaagcatagcatgtgccacactgaagaatattctggttcatttcaagctgtactatgctggtaaaccagccctctgggtagggcgagggcatatgttcggtggtggtggtagggaaccttcatttgtggcttttgcctgtttccctggtgtacatatttctactctggtggatttcaagttagcagcatttggcagctagtttgcaaaagtcctaaatatttaacagtaggctctgggggagctggcttcagcacaccactcattttgagggacattctgctttttatttgatgtattaaatggatgtttttagagatagggtctctctgttgcccaggctggtgtgcagtggcatgatcatagctcactgcagccttgacctccttgtgcacaagtgatcctcctgcctcagcctcctgagtagctgggactacaggtgtgcgccaccacacctggccaattttaaaattttttgtagaggcaggatcttgctatgttgcccaggctagtcttgaagtcctggcctcaagcagtccttcttccacggcctccaaaagcgctgggttggcagatgtgagccactgtacccaatgctcattctgctttttatgtatttcacttttgcacagatcccctaagacattggtctggaacacaccatccacatcartgcacatgaaaatagttcaaaatacattaaaagatgccccctggctgattttggcatgaccagtagtacctacaactctgygttcttgtgtgtttgtgcaggctcaccagcctgtggatgtccaggtaccccgcagaggctgtcagcaggaagagtctgggcagacaggaaaactcrgggcttccttctgatttgcatttcaaaatgaaaatgagaacttttcaaaaaaatagttatcctgccaacaacattgttatactactgatgggctggggaccatgcttggccctggggggtcgaaaggggagcagaccacagtccctgcctctggccctgggtcaccatagtgggggctgaggcaggctgtgagggtctgtattgggagttcggctcttgaacaaatctactgagtggtttcagtactgggagatcctgaaatggtttgtctttgcctacagccatcttggaaaatggcttaatctctccggcacctctcagtttcctccttggtcaagtaaatataataatccttcccttataacaaagattctcagagtcagaagttgcaggggggtccttacgttaataaatgcagcatcacctgcatacttcttagaaatgcaaattcccaagatgtagtgactcacgcctgtaatctcagcacttcgggaggctgaggtgggaggatctctggaggtcaggagttcaagaccagcctgggaaacatagtgaaatcccatctctggaaaaaagaaaaaagaaatgcaaattcccaggccccaccttcagaccctgaagatcagaagccctgtgatgggcttgtgttttaccaagccttgcaggtgatgttggtgctgaaaccagctcttgtgtgagacccactgagctgcagggctgttagggtcaccatggccttttgtgaacacagctcagcgcctgtcacatgtaaaggctctatctacggcagttccatgggggacacaaatagctagaaagcgttttgagctgtctgaaggttgaggaagtgggatgcacrtggtgctagctttattttgggataggaaggagagaaggaggcaatgttccttttgcaggatctgttgatagaactctccttcccctaaggcatcaactgcctggttctcttactgccaatgttagaagctcccttccccacaagttgtggcccagttctttgtcctgactcttggagtcctgggagatcgtgggtcttcctgaatagaagtagaaatgaactatgcgatgggctcctctgcacaatccacaaccaccagctccttagctacttatacccctggcctacttgtttcattttcttcatagcacttattattcctggcacttaattttgtgatttgttgctataatgtttacttgtccctggtcttccttgtccatcagaacagaagcactctgaaggcagagacattatctgttttgttggctgcggcctctccggcacctgagaacagcagccggcatgtgatgggtgcccctgtaaatgtctgtggaatggctgactggctrgctgggtgggtagcagggcaggtggctgcaggggtrggggkggtccataagagtgagtgttctgagctgaacatacaactgccattcgatccagtaatcccactactggatattcactcaaaggaaaagaaatcattctatttaaaagatacctgcacttgtattktgccattcacaatagcaaagtcaaggaatgatatggtttggctctttgtcccccacaaatctcaccttgaattgtaataatccccacatgtcgtgggagggacccagtgggaggtaattgaatcatgggggtgggcttttcccatgctgttctcatgatagtgaataagtcttatgagatctgatggttttacaaaggggagtttccctgcacatgtcctcttgcctaccaccatgtaagacgtggctttgcttctcctttgccttcttccatgattgtgaggcctccccagccatgtgtaactgtgaacccattagatctcttttctttataaattacccagtcggccgggtatggttgctcacacctgtaatcccagcactttgggaggccgaggcgggtagatcatttgaggtcaggagtttgagaccagcctggccaacatggtgaaaccccctatctactaaaaatataaaaattaagcaggcatcgtggtgggcacctgtaatcccagctacttgggaggctgaggcaggagaatcacttgaacctggcaggcggagattgcagtgagccgagattgtgccactgcaccccagcctgggtgacagagcaagactccatctcaaaaataaataaataaataaagaaataaattatccagtcttaggtatttcttcatagcggtatgaaaatgaacaaatacaaggaaacaacctaagtgtgcatcagtggtgggttggataaagaaagtatgttatatacaccatggaatactatgcagccataaaaaggaatgaaatcgtgtcctttgcagccacatgggtagagctggagactgttgtcctaagtgaactaactgagaaacagaaaaccaaatcctgcatgttctyacttacaagtgggagctgaacaatgggtacactcgcatagacataaagatggaaatgatagacactggggactataaaaggagggagcgaggggcatgagggtaggaaaaccacccgttggatacagcattcactatttgggtgatgagttgatgagaaacctaaacctcagcatcacacagtatacctatgtaacatgcctgcacatggaccctgaayctaaaattgaagaaaacaaaatatattttaaaaagaatattacaaaacagcaaggtaacttgttacacagtatatgacatgtcacatttttaaaatgatataaatgttacattaaataaagaaggagtgttctgagacactgccactgcgcaaacctgggcactttacagacgtgccaagagaaagggtttgcatcacagcctgcctgaaactttggtggaagcactgagaaagttagtgagtagacagctgtccagaggaggggagagagtgtttcctttggaggaataatgattattgcagtctttttcaccccagtgcccatctgtgccctcctttttcatttattgacatgccacttttgtgccatgggcggtcacccgtgaagaaaaacatttcacttacaccaaggggaagaaaacttcaaatccattatttcttttcagtttggaaagtttaatctgtgagcatagcttgtgtttggagcctaagataattgagcttctttctcctgctaacttttttatttatgatacttaagaggaggtcaagctaggcagttcakcttagcttttgatgtgtgcccaggagagggtgggatgggggatgcagcaaaaagtaataataatgatactaagaaaagaggtcactgtgtgtcagttactatgtttctgtttaatccacataactagtctatgaatgaataggtccttttgttagtagccttctttacagatgagcaaattgaggctcagaggtttattgacttgctccaggttacctgcaaccttgtattaatttgccaggactgctgtactggatggcttcaactcatctcagatttctagagcctagaagtctgaaacaaagatgttggcagaccacgctccttctgaagaatcyttccttgccacttttagcttccaggttctggtgtttggagtgatacagctacaagctagacattccttggcaggtacatttggcttgtagctgcattactccaatctctgcctctgtcttcacatgacctttgtcgtaatatgttctcaggctgctacaaagaattgccagagactgggcaacttatgaaggaaagaggtttgactcacacagttctgcagggctggggaggcctcaraaaacctacaatcatggaggaaggggaagcaaacacatccttcttcacgtggtggcaggaaggagaagtgctgagcagaagggggaaaagccccttataaaaccatagatctcatgagaactcactatcatgagaacagcatgagggtaaccactctcatgattcaattacctcacaccgagtcccttgcacgacacatgggaattgtgggaactacaagttgagatttgggtggggacacagccaaaccgtatcaaccttcttccctctgtgtatctctttttcctctttttcttcttcttcttctttttttttttaattgagatggagtctcgctatgtcgccaggctagagtgtattagcgcaatcttggctcactgcaacctccacctcccgagttcaagcgattctcctgcctcagccccccgagtagctgggattacaggaacgcaccaccacgtccagctaatttttgtatttttagtagagatgggtttcaccatgttggccaggatggtctcratctccttacctcgtsatctgcccgccttggcctcccaaccctctgtgtatctctgtatattcccctctccttataaggacaccagccactggattcatcctaatctagtatttcttcttatggcagcaggaagaagtgttgagcaaaagggggaaaacctcttataaaagcatcagatcttgtgagaactcactattataagaacatcatgagggtaactgcccccatgattcagttacctcccactgggtccctcccatgacatgtggggattatgggaattaaaattcaagatgagattttggtggggacacagcaagaccgtatcaaccttcttccctctgtgtgtgtctgggcattcccctcttcttacaaagacagcagccattggattcatcctaatctagtagacctcatcttaacttaattacatcaacaaggactacatttccaaataagatsacattctgaggttctaggtggacatgtgctttgaagggacaccatgcaaccactgcaaactctgttctgtctgacttcagagtcatgttctcttcactgccttttacagacttgagcatggagggtctttgatagaggcatgcccaggctggaggaacgaagcgaaatggggggcaaactagatctgtgagctgggagaaaattccaccaggagggtgatgtttggctttgttgatgttctttatgttatttggcatgtaaactttcttgatggtggtgtcttcattgggggttataccttttatcaaaatcaaataatcttccggcccactaaatgatttttgtttctctatcctctggatagtaacctggatagttcatattttctctttttgttttcccaatatatcttggggcatcttttaatttgtctgggttactgggttatatgcatgctttgtacaaatgtatagagtagcattttctgccccattgtgagctttttgcctttggatcagagagagagggagtattggagggagggaggtctctgaggttgtggaagagacaggggaccagagtccaggataatgagatgggcacaagggactttattcattctgggctcagtgtgaggcctttggtgtatgttctgtcctttcatcttcatggtttccctgtgcagtaagtgtgattgtccccatctgactgcgttggaaactgaggcttcaagaagtgctaaggagcttcctctgtggtcacgtggctcatttgtggcataggggattatgtcactatgccatcctacctctactttccaccttcaccaagagaggaatcaggggatgagggtaggcgtgaaaaagatcaagattaggacattgacctatgaagaccctcttggttgcaagtgacagaaaacccgtttaacctagctgaagcacagaagggaagacgcagaaatttattagcgcttataactgagaagttcagagttgcctctggctttagataaggccacactcaggagtttaagcartgggactctgccctccagtctgtcctgtagacaggctgtctccagtgtgatagataagacagcagtagattttcacccctggagaaagagggttttccttgacagttcccttagagatgtcctaggaaagtctctggtttggtttgaggcacatgcctgtctgaacccatcccaggggatgggggcctacagttggtgactgggctggtctgcatcacatgcccacttggaggaagtagtagggtcaccctgatccccatgggttggggttcacacagagaagaggggattggtttccatgaggaggagaatgggatgctggacagatgagaaccacagatgcccagagattgtagtggtctctccaggagactagatagtttcagcacagaaatgcataaaggcaaggaaaagcaggaaccatgggaccagctattgggaatgcccaaagttgccaggtttgaggagctgtcagaggtagaagaaaccaaaagcgggcccagttgaaataaacacagtgttattcaacaatgttaagtaccaggggcaactccagacaccaactctgggcactctctagtctaagactgtgatcctgatggaaggtttctcagtcagcccaggtgaggtggtaggatcacttgaggccaggagttggagaccaacctggctaacatagtgagactgtttctataatttttttaaagaatgtcatttagctagaaggatttggcttactttaatttcaactcatgtgcagacaggaaaatagcccatttcctggaatctgcaaacatccagatgcatgagccagagaaaggaatttcaaaacggctgctgcatctttcactggatttgtttctcatgtgctatgatgtcccagagagtgcagcaggatccatgggcggcttctccatccagctctaatgagcatcatgtagaaaggcatcatcccttattatttgttatctctgacacctctcactttttcctttgtgatcatatcactgaattgagccctctctgaagtctactgcagtagcaacgtgcccctgtttccttaacgctggaaaatcgtgttggttttgaatttgggagacaatgatatatatttccagatatcagaaaaatccattttgacctaaccacctcccagtgtgggaacaatttatggttttctacttgatgttttgaaaattcatttggaaatagaaaaagtgacccatagatttcaggttagtgtcgtgggatgaagatgagctcacctgctggagacaattctcttctggaaaraatccgattccctctcatccctactagggcccaggtcacaggttgcktctatgtgttaactctttcttcctcaatgttctccaagcctctccttgctgatcaatgacaacgccacccccttgggctcctgtgccatccctgaatcttgctttcatggggacaaatcctacaagcatccacatgcttaaggacgctgcatgaaatcccaaaacccattcagtgtgatgctttcttttgtgaacgaaaaagctcagacaaaagcatgttcatcctaatgacgactggcaggtttgtgcctcctgacgacgagagccactctgcagcccaccttatttccagtgcagtttagcaaacatctggggtttgagatgcaaccagatgggaaccttttagcctggtgggagaagaagtaatcgaatttacacagcagaatgaaggaacagcagtgaaggaagagtagcaatgcagagagagaagggaaaaggagagggccatgttattctttgcccscgcaaggctagcccagcatttagcactgtgtcaggcacatagcagatgcccattccgtatttgttgaatgagtgaatggaagggcttctgcctgtttagacaaccagtgtgtgtatgttccaaaaggaaaatcctgcataagggcagaggagggaggaatattgtgcagatgggttgagggctgaagaatgtcctcaggacatcctgagtcctatggactcaggactggggtccatctcaagggagggctgtgggtggggggatgtctgcttctatggggagggtcaggtttcaggtgaagcagatatggtagggggaggttactgagaaaaggctaaagcctcagagaagttacctgctgtgggaaggtctcagaggctacctggaaatggtttgccaggaggaaagggatggagaattcgctaggagggaaggagtgctaggcaatgtgggggtgaaggctcaagaaaggaccgaaggcaggaggggttctgagagtgagcaggacatatagagggtggtggcttagctgggggatctgctcagagccaaggtgggaccagaacacatgccccactgccactcgttttttaattttagagacagggtcttgctctgttacccatgcaggagtgccatggtgtgatcatagctcgtggtaacctcaaactcctagggtcaagtgatcctcctgcctcagcccccccmaagtagctgggactgtaggtgtgggccaccatgcctggctaattaaaaaaaaaatttgtgtgtagatggagtcttgctgtacacctttcccaggttcttttcraactcctaggctcaagggatcctcttgcttcagcgcttggattacaggcatgaaccactgtgcccagctctccctgcttttattttatttttttgtggttcaaatttttgtcttggtttaattatgttgattatattgattttattgtattacagccacctgcaaattattctcatacctacatagaaataaataaaaataatagttaaaaaaatagtagactctccaagcttagaaagccaggctgtcttctctctctgggagtcagcatcagtggacactcaggtaagatttaaagaaaatctattccagatgatatggtttggctgtgtccccatccaaatcttatcttaaattgtagtttctatattctccacctgttgtgggagggacctggtgggaggtaattgaatcatgggggcagttactcccatgctgccgttcttgtgagtgagttctcatgagatctgatgtttttgtttgttttgagacagagtgtagctctgtcacccaggctggagtgtagtggtgaagggtgaagccagctggacttcctgggtcgagtggggacttggagaacttttctgtcttacaaagggattgtaaaatgcacccatcagtgctctgtagctgcaagaggtttgtaaaacgcaccattcagcactctgtaaaatagaccaatcaacactctgtaaaatggaccaatcagcactctgtataatggaccaatcagcaggacatgggcggggacaaataagggaataaaagctggcsgcagggaagcccgcagctgcaaccggctctggttcttttcggtgctgtggaagctttgttttttcgctcttcacagtaaatcttgctgctgtatattctttgggtccacgccgcctttgagatgtaacactcataacactcaccctgaaagtccgtggcttcattcttgaagtcagcgagaccacgaacccaccggaaggaaccaactctggacacagtggcatgatctcggctctctgcagcctctgcctcttgggttcaaacgattctcctgcctcagcctcccaagtagctgggactacaggtgtgtgctagcacacccggctaagttttgtatgtttagtagaaacgggtttcaccatattggccaggctggtcttgaactccagacctcaactgatccaccggcctcagcaccccaaagtgctgggattacaggcgtgagccaccacaccaggctgagatctgacggttttataaggggcttttcccccttctgcttggcacttctccttagtgccaccatgtgaagaaggatgtgtttgcttttccctccgccatgattgtaagtttcctgaggcctcccagccctgcagaactgtgagtctcttaaaccacattcctttataaattacccagtcttgactatgtctttagtagcagcgcgagaacagaccaatacaccaaagtatttccttaagaagttctagaggcagggttctataagctttcatagctggaagattctcttctatgtaactgctgttgtttaaattcattttctttcagtccttggtggagatgctttaaaatcattgcatttgtttttgtgaaaggaagttctgagcttttttttttttcttccataagtgagttaactgatgggtataaaaaacttacaggactcaactggtggggtggcatccaaggtgttatggggcctgaagcttacacaattttggctccttctttaagaaaaataatgcaaaattcataatacacaattaggtgcaaaagtaaatatctattttggatgagaaaagaaatcataacaaattgctaagttaaagaaagccgacaaataccgcagaaattacaaaattcacaaaaataatgtaaggtttttattaactaccgaatacacctttctgatcctttttttcctaccttctttgactacatattatttgactacctctttattatgacagcaattcggaatagccttttctattaataaagagaataaaaaggtaattcattccttcttccagtatggttggctaatccttgcttttttctaagagttgtaattgagaaaattcactttagcttcataactcaatttgcgtattgtcatgtaaatttttaggattgttgtaaaatctggaccaacctctctccacttgctatgtgagctgcaagattatcaggcatttcacattttcttgtggtcacttgtattaaatgtggttatggactggatgttagtgtgttcccaaaattcatatgttgaaattgtaacctccacagtgtgatggtattagggggttgggcctttgggacatgattaggtcatagggtaaagctctcaggaatgggactggtgcttttataaaagagaccccaaaaagatctctcatccatttctgtcatgtgaggacacagcaaaaagacagtatctatgaaccaggaagtgagccctcaccaaacacagaatgtgctggygccttggtcttcaactccccagcctccagaattgcaagaaataaatgtttgtggtttaagccacccagtctatggtatttttgttatggcaggctgaacagattaagacaaatattctttgaattgaggacattatgaagtatttgtgaagctatttctagttccgggcagctcagcaatatatggaagactggaaaccatcataaacacatcccataaagccaaactaaatgcgttcccaacctaaattccgcaaagccaaatcctgaataactgtgtgctcccccagcccctacttggggagaactataacacaaggaaaactgggcattcaactgattgcaataaaatatcttgcgtttgcaaattttacagaagcatatgattgtgtgcacacattactagggccctttcaaggccttagaaggggcccatgtaattgaaagaccctgaacttaagcctcaatagcttcacggtaaatcttgctctgcccacgttgattacttctggaagtgaatatttactaaatccccctggagtgaaggaaccctgggtgttttctctattagaccttttacatttttttaagtttcattgaaataggcattaagaatacttggcccaaatgataattacatttcccttacatctgtgtagtggtttgccgtttgcaagagttcacaatgctttattttctttcctctccactccagccctgtgagccagacagggccagtattattcccgttcgcaaataaggaaacacgctctgggcttgccagggctttttccatctgcctctcaggaggagcctttgccgcagcaggctgtaggtgtgatgaagggagcattgggcactaatctggagacccacgatcgatgctagctccaacatgaactggctgtgagtcttgtgttaggccttcctgagccttggtttcctcatttgtaaaggagggattatctcctagaggggccttgtttttgttttttttttctttttttgtttgttatgtttttgtttgtttgtttgtttttttgagacagggtctcactctttggcccaggctggagtgcagtggtggtgcgatcatgggttgccaaaaccctgacctcctgggctcaagccatcctcccatctcagcctactgagtagctgggactacaggcgcctgccactacaactggctaacgtttttgtatattttatagagacacggaactccccatgttgcccgggctagtctcgtactcctgggcccaagtcaagtgaaagtgctgggattacaggcatgagttactgcgtccagctgcttttaagttcctttttgttttgttttttgagacaaggtctcactctgttgctcaggctggagtgccgtggtgcaatcaggcttcactgcatcctcgacctcctgagttcaagcgatcctttcaccccagcctcttgagtagctgagactacaggcattgtgccaccatgcctggctaatttttgtatttttgtagagatgaggttttgccctgttttctgggcttgtcacaaactcctgggctcaaacaattctcctgcctttacctcccaaagtgctgggattacaggtgtgagacaccacacccggctgcttttaaggtccttaaagtgcttaagaaacacttttatctactagataagaggagggttcccacctccctctcgtctcatagccaaataggagtaagaggtgccttcactctccttatttctctcgcttctgttatccatttatagttaaccctttaacaatgcaggggttagaggcactgaccttatagtcagactgcgtgcaacttctgactcctccaaaaggtaactactaatagcctactgtcaactgaaagctttaccaataacataaaccatcaattaacacatrtttcgtatgttatatgtattatatgctgtgttcttataatcaagaaggctacagaaaatgaaatgttattaagaaaatcctaaggaatggctaggcatggtggctaacgcctgtaatcccagcactttgggaggctgaggcaggcggatcacctgaggtcaggagtttgagaccagcctggccaacatggtgaaaccccatctccactaaaaacacaaaaattagctgggcgtggtggtgcgcacctgtagtcccagctacttgggaggctgaggcaggagaatcgcttgaaccagggaggcagaggttgcagtgagccgagatcacaccacttcactccagactggtgacagagcgagactgtctcaaaaaaaaaaaaaaaaaattagctgggcatggtggcacacacctgtagtcccagctactcrggaggctgaggcaggagaatcacttgaacccgtggggtggaggttgcagtgagccaagattgcaccactgcactctagcctgggcgacagagtgggactccatctcaaaaaaaaaaaaaaaaaaaaaatccaaacgaagagaaaatccatgtgctgttcattaaatagaagtgtatcgtcataaaggtcttcatcctcatcgtattcatgttgagtaggctgagcaggaaaagggagaggagagttggtcttgctcagtggtggcagaggcagaaggaaatccatgtagaagtggacctgtgcagttcaaacccacggttttcaggggttacctgtcctttctggcatcattctgacatcccatgagtctgtcttttcctgactataagccctgagcgggctggatccttgtggaaattaagtatgtatgtgctcctctgatttcggaagcaggttgcaaactttcagaggtgtttgaacatcctgagtctctccagggtggtcttgcagcatgctcaggggcccaatgtcagtgcagtgaccttgcgtttagatgggttcctgggctgtgattttgcttcctcattttctgctttgatgcgtgtgttcatctggaaatccagagggtcccagaactgggtcagggcagcacacattgctggaggaagcccagctagagagtgcaggagaggagagttggttgatgctgagaaatatttttttgctggatccatttcttctgatgaaggtagccattccctcgggattttctttaggtgatgtatttaaaagatcgctgaaacatgatttggctcatgtgcttaaaaaccatcaactacataatttaatgtgcccattttatgtatggggaaattgaggtctggtgacgacaggtccagggtcaaactggactcctgatatctttttaaatttgacccttcagcagtacaggggttgcaggtaccaactctcacagtcaaaattttgtgtgtgacttttgactcccccaaaacttatttacaaatagcttaaggttaaaactggagcatgtgtttaaggttattcctctctgtgcaggcatcatctgaccacgtctttttttttttttttttgcaatccttttttgtgccttgttatcccaatcattattgggcataattaataaggaaataattgaattaaaatattctggagattttgcttttatgtacatttactggatcatacacgtaaatacagagatatatttatatgtagtttggtttttaaatttttgtctttctttttcctttttcaagattttatgtttttctcgtgataaagttcacataacatcagattcatgccagtgctgtcacctcatgcctgtaatcccagcactttgggaggccgaggagggcggatcacttgaggtcaggagtttgagaccagcctggccaacatggtgaaaccccatctctactaaaaatataaaaattagccagatggaccgggtgcaacggctcacacctgtaatcccagcactttgggaggccgaggcaggcggttgacctgaggttgggagttcgagaccagcctgaccaagatagagaaaccccgtctctactaaaaaaacaaaattagccaggcgtggtagcgcatgcctgtaatcccagctacttgggaggctgaggcaggagtattgcttgaaagggggaggcggaggttgtggtgagccaagatcgtgccgttgcattccagcctgggcaacaagagcaaaaccccgtctcaaaagaaaaaaaaaaaaaagccagatgtggtggcacgcacctgtagtcccagctattcgggaggctgaggcaggagaattgcttgaacccgtgaggcggaggttgcagtgagctgacatagcgccactgcactccagcatgggcaacgaagcaagactgtctcaaaaaaaaccaaaaacaaaaatccatcaggttcatcattttaaccattttgaagtgtacgattctgtggattttagtatatgcatgatagcatgcaaccatcactgccatctaattccagaacattatcatcaccccaaaaagaaaccgtgtaccyattagcagtcaaatatattggttttgaagatttgctaaatcatggtgccaagagtgttttatacatgtgtgtgaatgtgtgtgtcctcttgtaatgggaagacatctttcgctttatgacaagagtctttggaaaggtctttgtccaggcgggatgctcaggaatatactcatctagggagctgctctggattgcgatgccgtcttgcaggtggctgatgctataaaaatacatgcagaaggtcctttgggaggccctgaacagaggctgtaggaaccttggggagggagaatagatggcccggggaggctaccctgctttcttagtccctgttgagcccaggcctggcacagcattaaagagagctgggctgcagaaagaggctgtctgtaaaacaggcagggagccaaggtcctgggtggctggtctattaaaagctcccttgacaatttcgacaaaagcatcagtattggctggtcccatcctgatgtggatccttagcttctgtgtctgaaaatcctccctgaagttccatttgcatgtattattccattctctatgattccctgctgtgggttactgttctacagactcttatgctcagactccagagagccgtgtttgtttataaaaggcggtaattggaaacagtgtggttagagagacataatattggacacagacctcatcttggctctctgcctcgctctgtgaccctggcgacatcactcaccttctccgagccttggtttccacattgagaagtgagttggaatagtggatctagaagtagtaataccttcttcataggacytatgtcaggattaagtgagataatgcatggaaatactttggcatagtgcttggtacccagcttaagtgcccaataaatggttaccaacagaaatatacccatgattattaatatattaaccttaataaattaatgtatccatccagactgaactcccaaatagccaatttccccaacaccttttacgaaatagcagagtcgttaatttgtaacaccttctacatcatatattaatttctctttggttggccggtggactcggttttgttctgtggatctgtttttgatcattttattagaaacatttaactttaattattatgtcttttaattcttgttacattcctattcttccagaattcttaggcatgattttgttgggttgaccccacgttttactggggttgtgattagaatccaattccatgatagctaaatcttggtctgtgaaaactgtctaacaatattcagtcatttcatctagaaagagactatatttatttattggtttcagtattttacatctttctaagtatttattgccagggttattcctggacagtttttatttgttaacgttttcactggcattttatcccattatttgttctaattggtttttgctttaggagaggggttgatttttaattytaatgttatgcrtaccttatatccaatcgtatcactggatctatatactaattttctgagttattttgattatctcttgattttgaagcatgtaatcatataattgaatatgcatctaataattttatctgttatgaacttgattttctctaaatttatcttttcgattgttttaaatttcttgcatttatttatcaacctaaaattcttttctgttttctggtgcattaatttctgctttactcttattttccccttcccagttctttctttgtttctcaaactgtttcaacagagtggttggttcatttatttttcatggtttaataataaaaataattagggctgttaatttctttctgggaacatgtaactctgttatggattatttacattttagatattttcaagctagtttataactgtagatttgattttcttcttgaactaataattttcccagttccccttctgcagtgggattccgggagagagtagtcaacagctgaattaacaagtctagaaagcattcctagaaaaggtaccaggctgagaaacgaactggcttagagtaatgggttgcaycacaggtaggcaagtgacagaaaaacaagaatacataggttttgctggacagacatcaggcacaccttggttgggtgttctaagtgctgggctgcaaaagtctattaagcatgtcaagtctgtataggcaatagttgattaaaggattattttcaaatcctcatgttgtttggatttgttttgttggacatcttattatattcttattttattgtgctgtagtctgaatgtgaactgagcatttttaacagttttattgagctatcatggacatataaaaattgtatatattcaagatgtattgatatatgcatacattgcaaaatgaccacaattaaccaaattaacatattcattatctccacataggtaccatttgggagagggagagagagagagagagacagagagagagagtgtgtgtgtgtgtgtgtgtgtgtgtgtgtgtgtgtgtgttgggcagatttaagatctatcctcttattaaattacagtatacaatacagtattgttaactttgtcatcatgctgtacattagatcttcagaaattgtttgtctagtataaccaaaactttggaccatttgacccaaatcaccccattcttccctccccccatcctctggaaattagcatcctaccctctacttttatgaatttgatatttttcaatatgtgagatcatgcggtacttttatttctgtctcagtcacttcatttagcgtgatgttctccacctccatccatgtggtcgcaaatggcaggatttccttcttgttgaagggtgaatgctattccattgtgtatgtgtgtgtgtgtatacacaccykgttttctttatcaatacatctgcaaaaagatagtgagattatttttgtatcttggccattgtgaataatactgcagccgctcagtgtagatatttctcarcatactgatttcagttcctttggatatatatctaaaatgggattgctggatcatgtgatagttctatttttaatttttggggggaaccactatactgttttccatgatgtttatgctaatttacagttccccctgcagtgtacagggtttccctttactccaaatccttaccaacccttaccttgtctttttgataacagccattctaacaagtgtgagataatatctcatactggttttaatttccgtttccctgagagttggtgacattgtgcatttttttcatatatccattggccatttacatgtcatcttttgaaaaatgtcaattcagaccttttgcccattttaaaatcagattatttcttttttgctgttgagttccttgcatattctggatattaatcccttattagataaacatttcttgaaaggcaggtatagtagtgacaaacacagtttttgtttgtctgaggaggacttaatctccccaacattttaaaaggatagctttgcagggtatagtgttttaggttagcaattcttctttctttcagtcctttgaatatattacttcactgtccccaagcttgtaaggtttctgtgaagaaacgtcctgttagtttcatggtattttctttgaatgtgatgaggcacttttctctttctgctttgaaaattctttgtctttggccaggcatggtggctcacgcctgtaatcccagcactttgggaggccaagatgggtgggtcacgaggtcaggagatggagaccatcctggctaacacggtaaaaccccgtctctactaaaaatacaaaaagaaattagctgggcatggtggcgggtgcctgtagtcccagctacttgggaggctgaggcaggagaatggtgtgaacccgggaggtggagcttgcagtgagccgagatcacagcactgcactccagcctgggcaacagagcgagactccgtctcaaaaaaaaaaaaaattctttgtctttgactttttacaatgtagttaggtttctcagtatagtccactttatattcaatatatttgatgttttatatgatttttgagactggatgtttatttctcttcccagtttgagaacttttggttattatttctttaaataagctggttgccctttttgctctctcttctttctggaatgctcacaatatgcatattgttttgcttgatgatgtctcataagtcctttttttttttttttttttttttgagatggagtcttgctctgtcacccaggttggagtgcagtggtgtggtcttggctcactgcaacctctgcctcccaggttcaagcaattctcatgcctcagcttcccaagtagctgggactacaggtgtgcaccaccatgcctggctaatttttgtatttttagtggaaatggagtttcaccatattggccaggctggccttgaactcctgacctcaggtaatcaacccaccttggcctcccaaactgctgggattacaggtgtgagacaccacgcctggccatatctcataaatcctgtatgctttatacagacatctattagttctattttgtatattcaaatgctttatgttattatctataggttttaaacctgaccagtttaaagatgtaaaactggaaaagagttgttttgttcatttgccccccttttccaagaattttgcattatatattttgaagtaatgtcatttaatcccctctctcctgatgctgcgatagtctgcattaatgttgaagcttatcttttatcaatatataatgtctctgttttcctatgtaatgctttttctctttagtgatgctttgagtcaaatgaatatttccacctgtacacccttaactcagtgttcttaacctcccatcccctctgagtcccttacaatgggccgaggatacactttctatatggtaattcttctaagttctacgagaacgctgctggcttcatttctcttcaacctttccaatcctgattttctcctcaatatttttgtctagtggatatcctagacttgcttcctgtgtgagctcctttgcttctaggttcttcctttggacatgtctagaacattttccctgtacttcactaggcagctatctattccattgcttgcccaccttgaggaccctcagcttgcctcttacctaacagttgtctaggagggtgaggcagagtttgaagcctgcctttctcccttctcttccccttccctccttccttcctttctgtgtattttctttctctctgtctctctttgtttcttccatcctttctctctttcttttttcctttcttcctttctctctcccttccttcctttcccttcccctctccctccttcctttttcctttccttttcctaccttccttcctaccttccttccttccttcccccacctccactttcttttctttgctccctgtctggtagagttccatagaatggtcatagctcactgcagcctcaaattcctgggcttaagcaatcctcctgcctcagcctcccgagtagctggaactacaggtgcacaccatcatgcctggccaattaaaaaaaattagagatggggtctcattatgttgcccaggctggtgtcaaacacctggcctcaagcaatcttcctgcctcagcctctcaagtagctggaattacaggtgcaagccactgtgccaagcaggagtctgcctttctttcttgggtttkttttttttttcccagcctgtcatctgattcacatattttccttggtcacataatacaattttgctttttagtcctgggagctcttatcttttattaaagacatttttatatgagttgttttaagtaagtagtcctctgmcatttttgtttttagccttttcctcatagttggggctattcctcttgttatctgtctttgaagttatgggcaatgttttgtttgtctttatcatcaccattagtaattatctttcacatttaaaaagcagttcttgatcctatctatctctatttatcagaggcaagaatgaagtagtttcttttgattccttattatgtaggagatattttaggatttcttacacctgccccacacagaaacatagatatactcttgattaatgtattattggcctttgcagtgactcacgcctgtaatcccagcactttgggaggctgaggcaggtggaacacttgaggtcagtagttcaagaccagcttggccaacatggggccaaccccgtctctactaaaaatacaaaaattagccgggcatggtggcaggtgcctgtaatcccagctactcgggaggttgaggcagggagaatcacttgaacccaggaggcggaggttgcagtgagccgagatcattccgctgcactccagcctgggcaacagagcgagactccatctaaaaaaaaaaacaactatatatatatatgtatatttacacacatacatgcatacatatatatgtatataaatttggccttaagaaccaagaaaaaaaaaacgtgtttttttttagacagggtatatgtatgtaaataaaatatatcctgtaagtaaagtatgatatttaatatagcatgtgtaatatatagtgttataagatggtagaaatacacacaccacacatacacttaaatttatatatataattttttcgctgctgtgtcattgatcttggcctccatcatggtgcgtgaacacgccatgccaggagctttatcctcttcaggctatagaagttgaaggataggaaactaattcctagtccagttccctcctgcatgctggcattcttccactattgctctggtgggataaggagaaggcttttcttattgcttaagccttttcttaagcacacctcattgcctgctcttccatcactttcgccagatggaataagcaagaaaacaactctccaggttcttcttttccacatgggagctctcactcttggcacatggtactgctgcagcctctattctcattcatgctctcacctagggcacagtctcaaagctgatctcatacaccaaaagacgcctggggccgggcacagtggctcatgcctgtaatcccagcactttgggaggctgaggcgggtggatcacctgaggtctaggagtttgagaccagcctgaccaacatgatgaaaccctgtctctaccaaaaatacaaaaattagccagttgtgatggtgcctgcctgtaatcccagctactcaggaggctgaggtaggagaatcacttgaacccgggaggtggaggttgcagtgagtggtggtgcatgcctgtagccccagctacttagaaggctgaaggtggaggattgcttgggcccaggaggcagaggttgcagtgagctgagagcatgggcaacacagtgagaccttgtctcaaaaaaataggacacttggattagaatgttcatagcagcctttctcataatagctccaaagtggaaacaacccagatttcaaccaacaggtgaatgaataaacaaactgacatattcattctatagagtaccattcagcagtaaaaaggaatgaactactggtatatgcagcagaatgaatgaatttgaacaagtatcttgtagaataaaataagccagacagaaggagtacctactgcatgattccacttatgtcaagttctggaacaggcaaacatcatctctggggtggggagaattgcctggaaagagtcaggaaggcacttttgttggggatgggtcttcttttggatggtagctacacaacagatgtttatggttgtcaaacctcgttgaactcaagagttgtgtattttcttttattttttgagatggagactcactctgttactcaggctggggtgcagaggcacaatcttggcttactgcaacctccgcctcccaagcttaagtgattctcctgcctcagcctcctgagtagctgggattacaggcgtgcgccaccatgcctggccaatttttgtatttttagtagagatggggttcatcatgttggccaagctggtctcgaactcctgacttcaggtgatccacctgcctgggcctcccaaagtgctgggattacaggcgtgagccaccacacctgtcctgtgtattttctttatgtaaattatatatcaataaactaatggctgtactttttgcaaaaacaatcaggagaacagaaaataaggatatatagtatatataaatgtatatataaacagaaataaaatatgagtatgatttttaaaacgcaggactgaagttggtcctagctcgggcatggacgcgagtcttacactgtggcatctgctcctttttctttctggttcagaaagaagccagacctgagctgacacttgcgggcagctggagccagactgtcctgccttatttccaggtggctgggcttttctatttctaagggtaaaggtgtgttcaggtcactgtaatttttcatctagtgccatcagatttgtgcacgacttttattccagtggggtgtgtgtgtgtgtgtgtgtatgtatgtgtgtgaatgtgtacacaggctagtgccttctttgggatatttacccaaattcattttggrtgtgaggagatctatttcagagtttggtagcccaattcaaccctaagatataaaatatgattttaaaaagtcatagctgcccgggacattgggccagaaagtagcactggtggtgtggctgtggaatgtcatatctccattgatgggcacacgagggtttttgcactagtgactgacaggtgttaagtcaccacccttgcaactgactatcggagttccaaatgtgagaggtcggaacattttagtcactcacctgcggagagagggagactatagggccttagaccagtaaggcytttagaccacctgggcccgcccctcattctacaggtgagatctgagcctgcggggaggcagctggagaagggtatgtgtgggaccagctggtggcccgccttgacccccggtgcaatcagttttaaggccagtgctcttgcatgttaataacttttctcttggatggtgttttaatccgctgggactaaatgattctgtcataaatccttgcagacgagaggatgggaactgccgtttmtgaagtcacctgcaatgtgccaagtactcaacacatgctacctcatgaattcctaggtagtggacctaggaggtggcaattatttgttccattgtacagataaggaaaccgaggctgatgcagaattggggtttgttacaccatgatttttcccaggctccacgcattccacagatttacagtctcarttttcagttttcattctggaggtatcggacaggtgtctgctgtgtgcacgtcctgagaacacagtcctggccctcgtgggatgtatagacattgccactgtagcgctggaatcaatgggatttactgcagagatgacygtgggggcgaggttaatgccaagggtcagactgaaccctatgtccttcctgtgtgtctgcttgtagatttctggagggaatgtttctttttattattacaattttttttttaattgagatggagtcttgctctgttgcccaggctggtgtgcactggtgtgatcttgactcactgcaacctccgcctcccrggttcaagtgattctcctgcctcagcctctggagtagctggaattacaggtgcctgccaccatgcctggctaatttttgtatttttagtagagaagaggtttcaccaaattgataatcaggttggccaggctggtctcgaaatcctgacctcaggtgatccacccaccttggcctcccaaagtgctgggatcagagtcgtaagccactgcaccctgccctggagggaatgtttcaacctcataatcccggyctctcaaagcctgcctctccttcatgcctgacaccggagggggaacaatgactgccatgttcaataaaacttttgtgggagatgatttaaattgctttgatgacacccttgggagttgggactccttttagtaatttaggttgaaggaatgtgtgctttcatgaaagagaggaaatgtatctggactctgggctygaagctcttctttctaagaggaggcttgttggatttcaaaaccaagacgacaccacctcttggtgtgctggcagacacagagagaggactgtctgtcttccctcctgtgtccctctctgccacagctgaaatggctgatcttttcagaatcactgactgggggatgttcatgagcttggacaggataacaaatggaggtgggttattttctcatcctaataagtgagaaacagctgttcttcctagcttggaaagcaagtcatttgttttctacacacacacatgcatgcgcgtgcacatacacacaaccacacacacaaacacacatggttatcaacatgctgctaggaaaaattaaaaattgygcatcatatttctaaaagaggaagcagagaaaagggatttccagaattctaaacacgcctcccatcactgcgtctcctctcagctaggactttctgtttgcacagccgaggcctgcagggtacattccagaggtggacttggggctggccttgaacttccagaccctctctcccctctctggccggggctggggaaatgtcagctattctgagggccttggaagctggactcagttattttcggtaatgtatcatcaaccacttattccacttttacagaagctatttgtaaaatgaacagtgtttaatgtatttatatttaaagtaattattgaggtcaggcatggtggttcacatctataattccagtactttgggaggcagaggtgggaggatcccttgagccctggagttcaagagcagtctgggcaacataacaagaccttatctctacaaaaattaagaaaatcagccacacgtgatggtgccgcctgtagtcccagctactcgggaggctgaggtgggaggawcccttcagccgaggagttcgaggctgcagtgagctaagatcgctccactacactccagcctggatgacagagtgagaccctgcctgattactttttttttaaagtaataatactttttwaaaaatattttttaattattatattaaaatatatatttaatatatactaataattatatataataatatataataaaatatatatttaaatatgtatataataaaatatataacatatattttaaatattgtttaattattataaaaaataattacttttttaaaagtaattattgatagagagggatttacttttgccattgtgttgctgttagtcttgtagtccttttttctgtctttcaactgatgtataatttcagttaagtaagatgaataagttctagttacccaatatgcagcattgtacttatagttgaggcataaactcatttagtactttaatttggcccaaatacacaagtgtgcgcagtattggacacttaaaaatttgttaagaggatagatcttgtgtgaaaggttcttaccacaaaaaaaactaaacgaaaatgaaataaaaatgaataatgtaaaggataggtaaattacaaagtacacaaaggcaaaaaagaatttcactgtcttttgaatgaaccctttataggcggtttctgctttatatgcaggggtggaaggtgaagaacctgctattgacagtgactttgaaagactttgagaaaatwgtgtaagtaggtacaaartgtcatcacaaaccatgtgtcttataatacatgtagcaagaatggaatactgtgtagccataaaaaggaatgagatcatgtcctttgcagggacatggatgaagctgggagccattatcctcaccatactaatgcaggaacagaaaaccaaacaccgcgtgttgtcacttataagtaggggcttaacgatgagaatacatggacacagggaggggagcaacacacactggggcctgttgggagagggcaggggtggggagagcatcagggaaaatagctaatgcatgcggggctgaatacctaggtgatgggttgatagttgcagcaaaccaccatggcacatgtttatgtatgtaacaaacctgcacatcctgtgygtgtatcccagaacctaaaataaaatatttttaaaaattaggtaacagagtctcagtatgctgtccaggctcaagtgcactggcatggggcttcagctgtgtcatatttcaaaatgagagttctctacatggcggccttcgaataatgtgtgctaatttcaggacctgaaagatactagcgtacatgtgcagggccatgtgcacacactctccttgttgtcccagggacctaggtctccttgtctgttgcctctgagctcaggcactgtaacctcatagaacgtcactgtaatggggagacaaagctaggctgaattgatgaaagctggaaagactactttactgggtcttattcattattttcagcagcatagcataaccstgctctttaaaaaatggactaaattgagagtctgttgaacttcccccgttcaacatggggtattcatttgttattaggaacggcaatttttatgcatgtaattaacatactatgatagcttcagtggattaggcgagtcatatatgtatatatttacttttttgagacagagtctcgttctgtcgcccaggctggagtggtgtgttggctcaatcttgactcactgcagcctccacctcctgggttcaagcaattctcctgcctcagcctcccaagtagctgggactataggcacgtgctgccatgcccggctaatttttgtatttttagtagagacagggtttcaccacgttggccagggtggtcttgatctcctgacctcatgatccacccacctcagcctcccaaattgctgagattacaggcatgagccactgcacccagccttttttttttttgagacaggttctcgctrtgttgcccaggctggagcgcagtggtgaaatcatggctcactgtagccttgacctgggctcaagagattttcccacctcactctcctgaggagcagagactataggtgaacaccactacacccagctaatttatatttttttttgtagagatgggatctcgccatgttgtccaggctggtatttatatcttatatataccacttaattgctttattttcatttccttcgtaaatgatatctaggtgaaattaaccagccttttttgaatgaatgatccctaagtttgaattggtggggtctgkgtaaatggatgagggccatttgaatagacrttgggacacttgaagatgaaaaattcatggtcaaatacaacatttttctgacttgtgctagaaagatgtcagattctcttttttgtttaatacagtgattmctaatactcagcacgtcgacctgttgcttggaagtgatttackcattctctggtctgggagaattactgcctttttttttcttcatgactcagagtgggctggacwcccctctaaagaagccattaaatttgatgaagagccacattccttgcaaggcttgacctcaaacatttgagattagccctttgaatttctctttctggaagtctgacagcaaaacttggtgcatttttctctgcaggatccaaataatagctaaacgcctccggggcagctgtaaggcaagtattttaaaaacaaccatgttaaaatgatctggagactgcaaacaatcggcttttctttcgccccaggagtctcaaggtgcacacttgcatatttgagccaattaaaatactaaataagcttgtccctcaagaatgtagacagagcttttcactctaatttctgctcaatacccttgagcacaccttgttggttgaataaagccacacctagtttctgcaattaggggaaccacgtagttgatttttgcaagctttccttcatcagagaatgagcagtcttcattcattcaatgcagtgatgcatttgttcttttacccaacagatactttttgaacatttacaacrtgccagcatagtttaayctgtatatattcgacagacgctaagttaactgaaacggcgttcagaggtggattaagtattcatcagtgcgtatatagaaactgaaggcatggagtgggtgacaaagtgggtacagatgttgtctcttcccctttgcccctttgggtaaattaccgtatgatcttaaatacattgtcmaggaataagccactgaaaacggagaaggttttgatgacagcgctgcatgcatgtttttgttaagaaacactccaagggcatcattcttgggctatgtcaaggtctatcaactgggaaccactcaatttaccaggctcccaagatgcaagtggcctgtgtttgcttatttgtgtcaaggggatccctacagttcagataagttagttttgcacttcccactacagtgtttttgttggaaagtggtctgctaagtgagaacccattgccagttttacctacaagtcctgtatttcttttttcttttttttttttgagatggagttttgctcttgttgcccaggctggagtgcaatggcacgatctcggttcacctccgcctcttgggttcaagggattctcctgcctcagcctcccaagtagctgggattacaggtgcccgccaccatgcctgactaattttttgtatttttagtagacatagggtttcaccatgttggccatggctggcctccgtgattcayctgccttggcctcccaaagtgctgggattacaggcgtgagccacacaagtccaatattttacctagaagcctagcaattctttctgtgtaaggagatgcatagaacacgtttggggtagaggtagatgtagctatagatacaattacagatatagttatggatatataaaattaaataccttaatccttgactttattatttttcttctatcacatataatcctatttggagcaaaaatactttgagcacatgttaattttgctagttttttgggatagtttttcccgccagtactcccatttgcagaactagtggtaaatgctaatggaaaacttcttcagttagcagatttttattttactttattcctggggcaattctccttaaattgtagatcaaatccagctgcaggctaaagcaccaaaattttcttgttttcaactaacccacggcaaggataaatttttctaccccctgggatggcagattcagtcccggaaattcagagtagtgaaattgttagcagttgttcttaaaatctgggctctcatttcatggcgatgtctttggtctttgtgttgaaagcaggacctctgtaagccccttctcctccccagactgtgagtttggtgggtgttatgacaacggtgaggggacgggggagggcccctccaggaagttgtcatctcagtccagtgcggggtcagcagtaaaggacttactaggttggcgacctgatgtcacccagagccagagaagtttccatatctcaatgaaccttttggattcgaagagagatmattactaactccacggactggccttagaagactcttcctctgacatcatccaattcattctgccacttaaaaaaagaaaaaaaatccaggtaccgtggaaagccactggaagctttaagcaagagagtgtcctgatttacaattaaaaaatttctaattaggccgggcatggtggcccacgcctgtaatcccagcactttgggaggctgaggcaggcggatcacttgaggtcaggggctcgagaccagcctggccaacatggctaaactccatctttacttaaaaatactaaaattaggcgggtgtggtggtgcgtggctgtaatcccagctacttgggaggctgaggcaggagaatcacttgaacctaggyggcagaaatagcagtgagccaagatcgcatcattgcactccagcatgggtgacagagtgagatttgtctcaaaataaaataaaataaattctaattttggtaaaacatacataacatgaaatttaccatcttaacaatttatatgtgcatatatcagtagcgttaagtatatacacatttttgggcaacagaactgttttcatcatgcagatctgaagctctgtacccattaaacaataactccccctacctgctgtcaacgccccccactattcttctttctctgtctctagaatttgactactctacatacctcatttaagtgaaatcwtacagtaattgtccttttgtgactggtttatttcacttagaatatcgtcctcaaagttcattcaagttgtagcatgtgttaggatttccttccttttgaaggctgaataataatccattgtatgtttacatcttaggctggtgcaaaaataattgctgtttttgccattgaaagtaatggcaaaaaacagaaattacttttgcaccaacttaatgtatcctcttttgtttattcatctgttgatgggtacttgggttgcttctacctactgactattgcaaatagtgctactatgagcatgagtgtgcaaatatctgttcaagtccctgytttcatttckgttttgttttgttttgttttttgagacagagtctcgctctgttgcccaggctggagtgcagtggcacartctcagctcactgcagcctctgcctcctgggttcatgccattctcctgcctcagcctcccgagtacctgggattacaggtgcccaccaccacacctggctaatttttgtatttttagtggagatggggtttcactatgttgggcaggctggtcttgaactcctgacctcaagtgatctgcccaccttggcctcccaaagtgctgggatgacaagcgtgagccaccacccctggtccctgctttcatttctttggggtttatgcccagaagtaaaattcctggatcctgtggtaattctatgtttaactttttgcagaaccgccatactgttttccataggggttgcagcattttgcattcccatcagccgtgcacaaggtaccactttctccacatcctcgccaacacttgttattttgttttcttgacagtagccattttaatgggtgtgaggtggtatctcattgtggtttatgtcacatttttgagtatacrttttaccctgctgggtatatgttattacactaggtgctggcttacagaggcaataagacccactttctgccatgagagaggaaactcacaatctgttggaggagacgggcatctaaacggaaaattataatacagcttatcaagtgctatgatagagacaggtcttaagagagcagagagtggatgcaatcgaggaagacttcctggtcttcatagccccacctctaggaagtcttccttggttgcacccactctgtgctccgttaagacctgtctctggagtagcagtagagttcctactcaacttctcattttctggttccttctaccaagttaagcatactcattagaaggaaccagaaaatgagaagttaaatctgaagtccaagtggttggtgagtattggttagagcactatttttagaatagaagaatgcttatgagtgaagcattttttttttcttttcatttgtgcatttctctggctctgggagattgtaaaggttacttcattgggatgcttagatcacagtttctggttattagaaagaggccacactgagacctttgggagaaaaggggcacagcaggtgggtaggtgggacgtgcctcattgagcctgattcaggggtcttgtgtgttttccatttcatccaattctgggaagtctgaaggctccgggtcagaggggagtttgttgcatgggggcagttgtctggaaagcttagtgacaaagtagcaaataggagcaaggaaacaaagtatataaagacctgctatttaggaatggcactattcttgtcgtggtgactcacatttgtcaagccttgaaggatatttgcagaggaagaaagaagcattggattgcagctcggtgggagcagatcctggctgccagtgccgggaccaaggcagggtgtgatctcacccgtgttgccaagggtcatcccacacccagactgttcggtttccattctcattccttggcattgccttttatagaactgctttcaaaagaggcattggggctgatgtcacaggatcactatgtgtttctcaggagtagggagggaatgaataggatttttcgaacattctataccaaattcactgccctccctccatttgatttaggacttacatcttcagcatcctctctttgttaggctcctctggaattgtctgtccccctggctagatcaagagcccctctgtatccccagaaccttgcagcttcaggcactttgcacgagataaataaacatggatgcaatgagaaaagggatgtgacaggtattggggaagacaagccagcaactgctctgggctctgctttggaagtgcctttcatttctctttagtttttttttttttttttgaaacagagtcamgctctgttgcccaggctggagtgcagtggcacgatctcagctcactgcaacctctgccttttgggttcaacggatttcttatggctcagcctcccaagtagctgsattacaggcaagcaccattacgcctgggtaatttttgtatgtttagtagagacggggtttcaccatgttggccatactggtctcgaactcctgacctcaggtgatctgcccacctcggcctcccaaagtgttgggattacagatgtgagccactgcgcccagctcatttctttttactctctatccaccacttgtcctagctcaaatccttttgagtctgacttggacagctgatgtcaccctctacctagtcttttttcccttcagtgccatttttccaactcttgtcagtcatttttatgctgtcattgcatccagacctgatcatttcttttctctttcctactcaaaacctttcttggttcactgtgactcagtgaataaatccatgacccttggcagtctaattcctgtttgtctttccagccttgccatcctgcccagctacctgcctcccatctcattccctgctaaatttgcttcttccttatgtgagttgaggcacacgctttcccttctgctgggaaggagtttccacccctctgagaccacatccaaatgttatctccttgaggaagccatgcatgctccctgccgagaccaaggagagaaaaccatgccttcgtctgggttcgcataacttttgtctacacttttgtcgtgtcrtttactgcaaaagttgtcccccaagctatccttttatttacatttgcttattaatttcaagaattatttgagatagtattcaagttacatactagaggaatattcctatgaatataggatattataatgataataagagttatgttaaggaattcccataataaagggtggagggagagtggggatgaatttggggtcatgtaaatacaaactgcatatgctgtgatgtttagcgcatttgccagaaatgtttagaatacttatttctaaacttggacctctactttctaccagccaacactaagagagaaatatattgatatgatttggctatgtccccacccagatctcatcttgaattcccacgtgttgtgggagggacttggtgggaggtaattgaatcatgggggcaggcctttcccatgctgttctcgtgatagcgaataagtctcacaagatctgatggttttataagggggagtttccctgcacaagctctctctttgcctgccgccatctgtgtaagacgtgacttgctcctccttgccttctgtcatgattgtgaggcctccctagccatgtggaactgtaagtccatcaaacctcttgcttttgtaaattgcccagtctcagatatgtctttatcagcagcatgaaaacagaagaatacatatatcatccatatggttcacgatgtctccaggatgaaatgaatcagaagcagaatgactctgccaggggctgagacgctaaagaaatttcccttactttgtcayaaaggattccctaaatcatatcactatgtgttcaatggcatcgtctttgtaaatgtaacttcacattccgtgtgcctatttgcatctgtttgcaaatagaagaacacgtagcactgtctgagatcatgaggacatttagtattaggtttgtgcaaaagtaattgttttttgcatttaaagtaatggcaaaaactgcagttacttttgcaccarcctaatatttacctaaggattctagtggcctggggtcccagatgccttcaagcagttcagcagtgcaacatatatgtttccctttccttcatggctaatccaaacattgtatcctaaccccagcatctcaagcagggtggatagaaaagggcagtcctttttattagcaaagatgaatccttccagaatcttttcagaagactttcctttctattggccctaccagagtcacccaggtacacctagtaacaaaagggctagagaagtggctctgtccttcattctgggctggatggaatgccacgcgatgttctgctggtgtagaagagaatgggagaagtggaggaagggatctcaggaagacagctgggagtgactaccacggtagttctctatcacgacactagtccagtaaatcctgctttgcaggaggtaacaccagtgagcagctcgccgctgatgagatttattcccaaaataactttcaaatctgaagaggaatggctgctctgtatttcatttcagcaagtctccatggatattatttttctttccactgactttatttataacctgagctgcaggaagctggaaggagaagctccttgacaatatctggagcctgggcttgctatttgaccagttaaccctacgttttctcccttggcgaggttggggatgaggaaacaccttctctcctaaagatgggcctgatgaggatgcatggttcccaaggtgtgtggtgttggtcagggaggaatagcatgctctaggtttggcaggccgactcatttggcttaggccctctggctaagccataccggaatggggctcagtggtgagtcaatcaattggggaagcatcttatgtttggagatagcttaacagtaagaagtgagctaagggtgctgttattgcaagacccccatctctacaaaaaataaaaaataaattaatggggcattgtggtgcccaaattcaggaagaattttttttaaaaaaacctaaggcctgagtcacattttttaaaaattgaaaaagctgtgggggatcccagttcatgcttctctcttctcaatccaggatgagatgagcagcgcagcatctcagtgaagagtgatgtcatggacacagttgggagagccttcccttgatttgttattcttgagataggctgaagaaggaacatgagtattcagtcattagggatgtggatgggtacaccatgcagttgctcaccagtccctgtgtgggagaggcaaaagatgctacagctaagaaggattttggtgattgctgagatgcaaggaacattagcctagcatattgctcatctttccacactagctgtccctccatctgcttctgaggtaggaggtagaacttgactctggaccggattgaagactggttgaaacagggaagaggcactgaaagcacttctccatgagacatgtccatgagtgccgtgacagtttaccattgccatagcaacaccaggcagttactgcccctggctgtggcaacaccctaaagttacctcctgttttctagaaatttctgaataatccatgccttaatttgcatggtattaaaaagtggttataagtattactgtaaaattgcctctgagctgcacttctgggcaaactgcctggggttagccctgctctgcaaggagcaggaccttcgtgctactgtgcactgatgcctcaataaaagttgcaacaccaccagctcatccttgaatttcttcctgggcaaagccaacaaccctcccaggccaagtcccaactttggggctcacctgccctgcattacttctaccagctcttatcatcctatttacctgcatcaaaaccttaatgttaactcctgccgtgatgtcatcactactgaaaactcttgaaaattgagtacaattatctgtgattgtggattagtgtattctgagtaccataacaaaagactgtctggtttaaacaacagaaatttttctcgcagatctggagactggaaatccaagatgaaggtgctggcagggttggtttctcctaaggccatgctcctgggtttgcaggtagtgaccttctcactccctcttcacacagtctttgctctgtgtgcatatctccctggtgtctcttcctcttcttagggtccacttaatgagcctcattttaacatagtcacctgtttaaagagctcatctccaatatgtttacattttgaagcacagggagttaggaattcaacataggtattttgatgggacaaaattcagcccataacagcttgtaagtgctattaagaagactcagggctagcattttgggaggttgaagcaggaggatcaattgaagccaggagttcaaggccagcctgggcagcatagcaagaccccatcactaaaatagtaagaatattagctgggcattgtggtgtgtacctgtagttccagctrcttggaaggctgaggcaggaggatcacttgagcccaggagtttgaggctgtagtgagctatgattctgccactgcactccagtctggggcaacagagcgagaccccgtatctttaaaaatatatatcccatcccagagtccacyctatagagaaacccaagtatttttccayttgttgaactaggaacatctgtggatattatgaacataaatattttattctaagcctctattgacctttcaattctctgaatcattgcaaaaattattctcagcagtctttatttttaccacctcagcaaaatgattctatctcagctccctgtctagactttaaattccaggaaggcaaggctgcatcttcatacctttttcctccaggtttctgagtgttggcaatgacactctttcggtaaatggaaatttgaaagagccaatgaaaaagaataatagttgaggagcaaaggtttctcctgcagtgggccaactgtccgtagcaacaaagacacatgggcaaacaaacagtgcttgcttctctttaggaaagaataattatttaccgtgaaagaagctctgtgaaaaaaaataacttcaatgtgtgtcaggtgaatatcctgtaaaggagactttttgaccttaaaaaatggtgagccatagctcagtaaaagctcattagggaagagagggagctagtctggggacagaatgtgtattgattgactcagaggttctctgagtttctctctataaaggcaatttgcataacaatgattacatattgggtttgaggcagttactgctcactggagtccttccagagtaactatttcggtggttgcagagccccctcagaaacctggctttaaaaggaaattaaatgtgaagggttgagttgctgcagttgttagccttgggaagggattaaaggggacgtttttgtcatgtgagatgtcaggaaaattcrtgaggagctcactaggttgtctacttggaaaaaaacgaacttcttcctaatggattttgaaaaagattatttaatttgggttcaccattagccattctgggcaagggatggaggcgaatgttacccttcattcttgtagagaacagtgaattgttctgtctttacaaaacmaaacgcaattgaaatatttttttatgtgtaatttattgctctgcagacaatggagtggaaaagttatagtggttaattactccccaaaaccagaatattgagtgtgtgtgtgagtgtgtgtctgtgtgtgtgtgtgtgtccgtgtccatgacacaaaactgcttctaatttattaggcaatagtcattggattaggcaatgtaagtatgacatttggagaacagtgcagccccccaaaaaagtagaatgaacttttagataaatgagagagaaagagagggtgttagaactggataatgactcaacagagcaagaggtcaaggcctttcagtgctagtcaaaggacccaaaaaggccactccaagcgtgatggtcatataacttgaagtggaaaccagaaagtctggaaagaaggacaaagagcccttccgatatttttgctccatgttctatttttgttttgtttttttcttttccattgttttgttgagattaatttacatcccatgaaattcactctactttgggaggccacaggagaaggatcacttgaagccaggagtttgcaaccagcctgggcaacatagtgagacccctatctctacaagaaattaaaaacaaatattagcgtggtgtggtggtacatgcctgtagtcccattactctggaggctgaggtgggaggatcgcttgagcccaggagttaaggactgcactgagccatgattgcacagacactgcactccagcattcattgagagcaacagagtgatgagaccctgtctgcaacaaaaacaacatcaaaattcaccttaaaaaagtctacagttcaccactgtctaattctggaatatttttatcactctgaaaacaaacattgtacccattggcagtcactcctcaatccacccctgactttggcaatcactaatctattatttgtctctggagttacctattctggacacttcatatatatggaagcatacatctatttgtttttttgtyrgcctttattcacttagcaaaacgacttcacagtttatccatgttgtagcatctatcggtacttcctttctttttatagtcaaatcatattccattgtatggatacaccacattttgtttatctatccaacagctgatggacgtgtgggttgttttgactttttggctgtgatggataaggctgctgtgaatcacttgtgtacaggtttttgtgtggacatgttttcattgctgttgggtacatacctaggagcggaattgttggatcatatggtaattccatgtttcacctttggaggaagtaccagactgttttctgaaacagctgcaccattttacattcccatcaacaatgtacaagagagcacttaaaattggatcccctaccatttgccaagtaccatgctgtcctcttggtgtgccttccattatatgggcttgtgttcattattcctcctttataggataagaaatggagactctgagagtttaacatatatgggaagagagaaaaaacatgcaatcactgaggttaaggctatatgatcaagtgtgagactggaaccctgaggttcttcygcaagagttggtggggaaaatgttgagtgcggcctcaagggcaggtgcagagtgctgtgaaacatagagtctgtgttcttcatagactgtttccacagactctgaccatcaagggcactttctcagaggtggaggataactgggacatggaagggtgtgtgtccatgtccatcacccttgagtgaaatatcccaactgttttgttcacctgcacgtacctgcagcctccagattgagctgggtaggtctgtcaactacggtgagagggccatatgattctccttggaatgtgaacacagggaaaccaacttatgtaaggtaatgcaacaagcaagcattgggcagagagattgtgtccagtgcaacagctggggcctctgcagggccaccagacttccctctgtgcttgcaactggaaatggagcaggagcaaagggaggaaggcaggagcctcgcaggccgcctggggtcctgatctgtgggtctgatcaggatcctgatctgtgggtctgatcaggatcctgatctgggtctgtggatctgagggttcaggatcctgatctgtggatctgtggatctgatcagagggagaatggaacagggtgggctgggtcttggctctggtcactcaagctgaacaaggtggggtgcgactgggaagtcctcaagaccatctgtacatagtatcttctcacgcctgcctcagatcattaaccagcatagtattgatccataatttggttgtgttgcttctcaattatttgttggtcttgcaatttctgattttggctttgattattgtgaggtttgcagcagagaaggatataaacaaatagatcccaaagtaaagggctcctccaggacttctaaataagcaccatgtagcttgggcagctccagctgacctgctggagggaggaaaggctgatggtaccacccatacccgcatacctagggaggcctgcttacttcacacctgaagggcttggctttggcctgggctaagaggtgcacacctgggagagtgaccctgataccagaaagaagagtgatacagggattgtttccacgtccattccctgaagctccttagagatggaaactggcatttcaatgttggggcctcttaggatgtacatgttctgtaggtcatgaaacccctaaagggttccagagcttttcccaccaaaaacaatacattcaggatgtttttcaaagactttccacaaactctggccattgaggttatttttttcagaggtggaggataactggggcatggaaggtgtgtgttcacatccatctcccttgagtgaaatatcccaactgtttgtcttgttcacctgcacacacctgcrgcctccggcttgagctgggcaagtctgttaaccatgatgagagacagggccgtatgtttctttatggaatatttacccccaacgtgcctgctgtttctttttctcatctgggaactctagcaagggaaggagctgaagtcacctggaacagctagaggcagaccaggtgagtgatggaatagtgaagattgaggaatctgcctggtcagatgatgcctcgtgctctgagaatcaccgtgacactgagctcttaggaaatcagctttgttggcatgttcacaggcagaattaggaccaatatctagaaggtataagatgttgcrgacgttgattctacttaaagagcaatgcctgattagaaactcaaaggctgggcgtggtggctcttgcctgtaatcccagcactttgggaggccaaggtggaaggatcgtttgaggctgggacccagatagaacagcataaagatgctagcttaggatgtgagcccaatggggcaggctgctctggggggatcatggctgagtgtggacctctgcaggtgtttattctaaagctggattctgaactggccacaacgtggagggctggagtggccttggatgatcctgacagtctgggtttctgtgtatttggtcatttcttatttattcagggagttatttttggtctgttgaatttatcaattctccaagacrttggattttaccacttgtacatctggcggatacaccctaagctagtgtctttatattactatatctgggtctgtttagataaagaagaatttggcttcttcctttcttttttctggtttctgtgatgctgtagtgctttgagtttttattattcataatttttggggtgggagagggggacaggttctcaccctgtggcccaggctggagtgcaatggtgtgattgcagctcactgaagcgttgatctcctgggctcaagtgatcctcctacctcagcctcccgaatagctgggaccacgcccgactagttttttgtattctttgttgagatggtgtctcaacatgttgccagactggtctcaaactcctggcctcaagtgatcttcccaccttggcctcccaagtactgggattataggcataagccactgttcccagcctttgagttttcaatcaggcagtgggacctcacattttttcatctgcatgggtcacagggaatcacagaacttagataatgcaggctttggaaatctgctgatgttggagacacagtcatgtcattccacattcttgcttatagcctcatctgtcaccagaaagaagagcagctgaggcattcttcctacgaccattccctgaagctcttttttttttktktktktgtggggggtgggatatagtcttgctttgtcaccagrctggagtgcagtggtgcaatctcggctcactgccaccactgcctcctgggttcaagcgactctcctgcctcagcctcccgagtagctgggactacaggcatgcaccaccacgcccagctaagtttttttttcttttgtatttttagtagagacagggtttcaccatgttggccaggatggtctcaatctcttgaccttgtgatccacccacctcagcctcccaaagtgctggaattacagatgtgagccacctcttgcggccccctgcagctctttggagatggaaactggcatttcaaccttaggacctcttaggatgcaggatgcacatgttctgtaattcatgaaacccctaaaggcttccagatcttctcctcccaagaacaataaattcagtacggagttgcagagaggagcatagaatccaagcgctccagcggtcttagaccttcttgaatccacatccccattgtacgcatgtgagtttcttgtggaagggatctgtccaaggtcattgggctgaccagggctgaccagggtgaagtaggcccagggatctaggtttctgggttccttggtgttatcctaatgtctgaaccacatcctcagcttgctgagctatttttgtttatctttctttctttctttctttctttcttttttttgttctgtcatggtaattgtttttctagcatgatcactagaatagcagtagttccacatttatctgccctcttacagcagactttttggaaaaattgcctctttctgctgccttctgttctttgcctcttgttctctcttgaatctacccaggttttggttttctgaaattggtgctgtgaacatcaccaatgcattggctttaccaaatgcaaaggtccattcttggaatctaccatttccagggtttccttctacgttcttctgttttctttgcttggcctttctttttctgattctatcrgttggtgtgtccagggctcagtattcaaacccctttctctttgtgtgtttctactgcccaggtcttctcctcaaggaacttgtctttaaactccatttagactgtggtgaatcccaattttctatctccaattctgacttctttcctgaactcccatgtacttgacagcttcatttggatgtctactaggcacctccaatgttgtatgtcccaaccaaactcttgattccatgttacatcccttcataacccaagtcccttttctcccccttctccatctcaatcaataacaccaacattcaacatcctttgttgctcaagccgtacatgtataagtgagttgttcttgaatcatttcttactctcacatatctttgggtaagctgaggtttggctgatctgggttttcagctgggcttggttctaagccacagattggatcttactgtttcatgtgtctcatgcttcttggatcagtgggcatcccaaagcatgttgtcatggtgatgtcaggatgaagaggctagaagcagcaatgcaagctcatttcaagtctctgctcatgacacatccctagtattttgttggctaaagcaagtctcgtggccaagctcaaaggctgtgggtggggaagtacactcagctcagcaaatgatcaagtccaacattagtggcgtgaagatgtttttgttgagcagatacatactctctgccctcttcacatgcatactcttcccctgaattgtgtgcatgagaagagggcagtctgcatttgctgaacaaaaatgtaatgtgccacctcagataatttttttttaaattgagatagtgtcttgctccatcacccaggctagagtgcagtggcacaatcacagttcacttcaacctcgacctcttgggctcaagcaatcctcctccctcagcctcccaagtaggtgggactacaggtgcatgttgctgtgcccagctaattttgaaaaaaaaaaaaaaattttttttttagagatggagtcttgctatgttgcccaggctggtcttgaactcctaggctcaggcagtcctcctgccttgacctcccaaagcactgggattacagatgtgagccaccatgcctggcatcagataagttcttaaaggaagaaatctacatctaagtaaatgggatcttgccaagagggtctttttatgaagaattggatgtgtatttaaaattgatagtgcttctgaatacctctttagaacagatgctttattgtttcagattctataaattaattagagatgatggtggtggtggtgggatgtgtgatactgatgattttgaagaggggaggaaggtagcaacattttattagggtgatccgtttttgttctgccttactcttccttatccttctgatttcataatttaccttctatgatatgaccagaattgttgtcactcaaaatctctaatcactggggatgtacccacgtgatagcagaaatttacatgcttttgggagaattgrtgaaggttcgtgtcccactctgtccctcctctttagcccctccgattaggaataaaaatgctagaaggagtgcttggagcatagtggaggagagagaattttctccaaaagttgttgagactgagaggkgctgagcaaatgcagcatgtgacctggtgtacagtgtcaagcacacatttgatgctgacaaatttcttaggtcttggcagggagagtgcttattcaattcagcatatttcttacctgctcctagatcagcctttttcccccttgtgcagctttataaatgctaggaggctaagtaacacaattaacctttcatccatctgctctgagaaaattctgaaggttcccaaactcttctttatttggttagaaatattctttgcacagacactcttgggcatatcagcagccagagactgtccaagacagacatacgtgtttatcttctcctcacacagggggatatttgtggcaatgtttgttcggtgctgagagtgaggttcgggcctttgagatcctcgccatcacagtggcatgaaatctgagagagcattgccttaaggcatgcctggtggcctgaaatacagagaccctgttctagatctaacacttcagaacattcttcattgtcttcgtgcttcaattttctcccctccctccctccctccctttttttgagactgagtcttgctctgtcacccaggctggagtgcagtggtgcaatctcagctcactgcaacctccgcctcccaggctcaagcagttctcttgcctcagcctctatattggctaggctggtcttgaactcctgacctcaagtgatctgcccaccttggccccccaaaatgctcagattacaggcacgagccaccacacccagctccctccctccttccttcctttccttccttccttcctttccttccttccttccttccttccttccttccttccttccttccttccttccttcccctccctccctccctccctcccttccttccttccttccttttttttgagacagagttttgctctgacacccaggctggagtacagtggcacaatcatggctcactgcagcctcaacctcctgagcttaagcagctctctcacatcagtcttctaagcagctgggactacaggtgtgtgccatcatgcctggctaattttctttcatttttttgtagagacaggtctcattatgttgcccaggctggtctctaacttctagcctcaagcagtcctcctgcctcagcctcccaaagtgctgggattacaggtgtgaaccatcatgcctggcctcaattttcttatctgctgactgtggataaagctattcggaggatcaaattaaataacctttgtagagcrattccaggaagtataaagttcataatacatgtaagacatgtcattttgaataaaaccrcagtttgaaaatttatggaacgtttgctccaaaggcacttcaagcgtctaacaatgattcatatctcttggaactacaaatgctacatgagcagttcagttaatgggcgaaaatgtacctccagtattcgtggctctgagggaagcacaaatctagagacctcttagtccttgttttgtcttctaggacagaatttaacagtggatcaccatgtgttataaaccaagttttgtccccygctgaaattcatattttgaagccccaagcctcattgtgatgctatttggagatgaggcctttcggaggtaatcaggtttatttgaggtaatgaaggtgaaactcttataatgggatcagggtccttataggagaggaagagacacaagctctccctctctctgtcatgtgaggatatagcaagaatgagrccatctgcaagccaggaagagagccctcaccaagaaccaaatctgcgtttaccttaatcttggacttcccagcctctagaactatgagacataaaggtctgttgtttaagcctctccatctatggcattttgatatagcacccctagctggctgagatactgtggaaagtatgaaaacatggtcatattaagatggctgaaggagtgggtgtgtttagcctggaaaaaaaaagaagataaaaggacggttaatgatatgtcttgataatgtcttgtaatatttgaaaattacatgataatgatatgtcttgataatgtcttgtaatatttgaaaattacatgaaagtgtaatctgcatgaytgatgtagaagaaaaaaataagatcattgggtagaagaaacaaaggtacccatttttgaaattttatttatttgaactataaaccaggaatgcagtgtaccacaaggtggtggactctttgtccctgggagaatacagtataagctgggtcgccatcactctggaatttctgcaccaaatggggttgtggggctagctgacctctcctttcttccaacccaagattctaagttggactgcaggtgtactaattgtcctaatacttagggaacattttactccattctcttccaccaagcagcagctgatacaattgaactcttaaaatttcattcaagatattaataacytttggacatcatgtcagggaagcactgaaaatgcaggagggaaaatgtcaaaatcatcatcataattcagttgtcaacaaatatcaagatcatcgtactgatatatgaactagggaatcaatgatgatttgacatgagttaatgaaacggcgcttacccrtttctgacatgtcaccaggagatttctgtatgcacagtagaatatgatgctaaatttggccagtgcagtttataatgcactcattcattcattgactcactttggtcattcagccgtccaatcgtatctatgatatttacgaggtgtttgctatgtgcaagacacaaagatgccttcctgttcacaagagaccagtgctcacgcaagtgagcagtcaagggcacatagactatgatatcagaaatgttgtggttgagattttcaccagcctctgactttctgggttggatagtgtccaraaaggatttccggggctctgttgagtagcagggaagactggcagtggtcctgaagggcagcagctttttagaaccatcagaggaaggtttgggtaccttaaacaaaggaaacagcagaggacgaggctgggcaaggactccactaataagcagctttgcatattacgtgaaaactttgggattattttccataggcagcaggaaggcactaatgaatttcaagcaagcagtgttcagatttgcatgttggaaagctcactccgaagatggtgttaggagttgcctgcaataactcaagtaagcggtggcttgagcttgcatctgggtggtggcagaagagatggagaggtgagaatagggtcaggagatattcagagttcacaccaagaggcccagcacagtggctcacacctgtaatcctaacactttgggaggctgaggtgggcagatcacctgagctcaggagttcaacactagcctgagcaacatgtcttaacttggtctctactaaaaacacacacacacaaaataagctgggcatggtggcatatgcctgtaatcccagctacttgggaggttgaggcrggagaatcgtttgaacccaggaggtggagattgcagtgaaccgatatcatgccactgcactgcagcctgggtgacagagtgagaccttgtctcaaaaaaaggagttagcaccaagagtcatttgagtaacaatttaaaaaatattatatttattaatttaatgtatatatgaatttaaaaatatatgcgtgcgtgwatatatatacacatacgcatgtgaatttaaaaatatacatatagcacacatatttagcataaattttgtgtacatgtaataattgaagtgcttattatagtgctttgtgtctaatagacatttgtcatttgaactaattatcactaataattgtatccaaaatggggctatcttttcttttggcaatatttcctgacaagctcttgtgttccattgatcttgcctatcctttcctagtccattatttcaccttcttaattattggagtttttcagtgtgtgttaatagctggaaggataaactgtatttttcagatacttacctttattaccatactggattctaagaggtggctcctcaaacccccaggagtacattgaaattggccaggagtaaacctggaatgttgctcactgttaagcttatggctgcaatggctgcaatttgtgcattgtctataagttttattgacttccagatgatctagcataaggtaggatctccctgagacgcggaccggcaggagggctctggcctctctgcagaaacttccaaacaaatgcctgcccagtggaagacgggctgcatgacatgctggctctttggcttagagagagagagatttactgcatgctgggctggggctgctgagatgatgaggagctttatgagttgacaaggcaccagattgcattttgctgtggtcaccatctatcctggagtttgtgcctccatcgtgtgtaccatctctatttctaaaagaataatgctggttatctgtaaacccataagtttccgctgtaaccctggagaaaatcatgtcctcatttgtatgaaggaaggtgggaaggcagctcagagtcaatttacaaccttgactcttttgttttgccaccaccatcgagccttcatagcttgggctgaacttaaccacagacatcggcagagtgatgtgctcttgctgascggtgatcaaccgtgtggccctcagaggatttctgggttctgtgtgagatggagctgctccatcattcacacaagatgtcgtgcaaaaatgagtcgttggcttgcctgcactagaagggaatttctaaaatttcaaaagtggaggttatttttatttatgtttcaaaaactggatgactacctgagaaaacatatattttacagcctcacctgccaacgtatatttaaaatttcctcccagtcttcataccactttagtgattattgctttattttctagcttaatatcagagaaggctaccccttttctgtcttttgtttttttaaaacaattctaaattttctaacgtctgtgttcttctaggttaattttagaacgttttattgtgttgcagaaaaaaaaatcccctttgaaattatgtgaaacctatgtattaaaaaggcagtggatgggtacagtggctcatgcctgtaatcccagtactttgggaagctgaggcggggggatcgcttgagtccaggagtttgggacctgcttgggcaacatagggagacctcatctctacaaaagttaagaaaattagccatgcaggatggtgcatgactgtattccyagcttcgcaggaggctgaaaaaaggaagatccctcgagcccagtagctcaaggctgcagtgaggtaagatcacccccactacactccagcctgggtgacagagtgagaccccaactcgaaagaaagaaagcaagaaagagagagagagaggatctcctaacaatctcccaacattccaacttccaactcaaagacgtgttcttctctgccacttatatatgtcttattttattgcatttagtaaaattttcaaatattcttcttactggttaaagttattcctaggtatactgtaatatttgttacttttagaaatagatttacttacattgtatattctagttggtttttgctgaattaaaaaacactattaatatgagatgtctacttgccccagcctgggcatccttttctagtgacagctgtatctcrtgactcatttccttatcaccctagaaacacttacttcactgacactgtctcagaggtcaccagtgcctttcattgccacaccaaagggctcttttcaggcttaattctctgtgacattcatcagtagagattctcttctttgtgaccataaatatactacaatatttaatatattcaacacctcttttcctattagatgctttccttatggatatttaatttgctttcttaaagtgaaatactcagtttgtaatagatggcctgaagctggttctccagatctaatctctattcatccatctacctaacagtttttaagaactctttgtgtgtcaggcactggaggtgaccacaygtatgccattaaggagagcacctaaacatgggaccacaggagaagtcttccagttgtgattggtagtacatcagtcccttttcacgctgctgataaagacatacccaagactgggtaatttataaagaaaaagaggtataatggactcacagtttcacatggttggggaagcctcacaatcatggtggaaggggaaaggcatgtcttacatggcagcagacaagagagaatgagagccaattgaaaggggaaccccttacaaaaccatcagctctcatgaggcttatttactaccacgagaacagtatggggaaaactgcccccgtgattcagttatctcccactgggtccctcccacaacatgtgggaattatgggagctacaattaaaaatgagatttgggtgaggacatagccaaaccatatcaggtaggatgctgtatctgtgaggatacagatacagcatcaagactttcctttctggcaggagacaggtagcacactcagaaggggcaattaaagagaggttaccaaaatatttacaaagattgtgaagggttaagggaaaccaataaggaatgacaagggttagtgaatgaccccagggctagcaacagagagggaagaaattgccaccctaaggtctgcagaggcaagaggagggagtggttaacagaatgcaaggatagctgtaamcctaagagaggcatgcctgataacaactggattatagaagatttagtaccttctactaaaccccagcccagtagggaaagagatgggagaataagtacacctctctctctttccatccatctgtcaagaagtgtccttatgttgcctcctattggttcatctcaacccaaagccaggggggcaggtgaacctatagctgtccctataggtctttctcctagagtatgcaactgggagaaaaaggatggagaatagatctggagtgaagcatgaaggatatttgatatggttgcagtaggatgactgaccttaatctgtccttcctctctttatcttcgagttcttacctaatagtgccacttggctttaactgtcgtcagctgttaggtgcaaaagttattgctgtctttgccattacttttagtggcaaaaacgacaattagttttrcaccaacttaataaaataactcaggcggaaaagaagggaacaatgaattctcgcaggcctggtgccaagaagccaccccattctcttcctgctttctctctttgctgctgcttctccccctttgacttkgtgactactctgcctacaagttcagtttcattcctcaaagattgcggctgcctctgacgactgagcaaggggcacttgcagaaaagaaggtttcttgggtacacgaaatcatcccaacttgctccaacggcaacctttcctggctaagttaagaccaacttgagttcggctggtgkacttgaactcttatttatctttgccaacagtttctggggcctgcaaaataagcacgttaaaataccagtgatttttttttttttttttgctgctttgttgaacctttgtggcagattaagtgggggtgaaaatggaagcacatggaccraaaaatatgtaattcacaggtgtcacatcgcactgtgaggaatgatctttttggaggctgttaagtgaatgcctttcataatggaagcaataatgccacataaggagaaaaaaatctcattgggaccatcattccctgtgtctccttggtgggatatgcatgcatgcttagtcttaatttctatactgttttataaaaaaaattctccttctggcccctctgactgcattggaaaggctgcccagggggttgtgctaggcaaacacatctgaaatgcattttagctctaaggtggaatttaatgacttgggattggaagctctctatttagatggaacaaaagatatgctgtatcgtcaagtgaagaaaaagacaagccaacccaaccacacagattaagttagaggaagaatcagaggtttttctgtggragctgcccagttaagtcaaaggtcaggaattctgtcccattctgatagtgtctcttgccttgacccttgggagtgtgtggcttgtgaggggaagttagcaagtactggggaagggaaagggaaaatccagggcgaatgagtaagagcacacagaataaagaggaaaaaagcatgcttgrtagtcttttagctgtctttttcatcatgcagtattggacacattatatgtatgacctatatatgtcaggctgtaatcgtacactgaggaacagctgtgcccatctcgcagctttacagtggagcgtgtctgtattagtccgttctcctactgctattaaaaactacccgagactgtgtaatttatgacgaaaagaggtttaattccctcacttccgcaggctgtacaggaagcatggtttggaggcctcaggaaacttagaatcatggcagaaggcgaaagggaagcaggcacaatcttcacatggacagagccaggagagagagagagagagaagggggaagtgctacacacttttaaacaaccaggtctcatgagaactcactctatcacaagaacagcaagagggaaattcgaccccatgatgtagtcacctcccatcaggtccctaccccaacactggggattataattcaatatgagatttgggtaaggagacagagccaagccatatcaatggccatataccttggaggtcctttgggtgtcctccaagaatatatatatgtatatatatatgtatatgtgtgtgtgtgtrtatatatayacacaywtatgtgtgtgtgtatatatatacgtatatgtgtgtgtgtatatatacatgtatatatatttgagatagagtcttgctctgttgcccaggctggagtgcagtggtgtggtctgagctcactgcagcctccatctcccaggttcaaatgattctcctgcctcaacctcacaagtagctgggactacaggtgcacaccaccacacccggttaatttttgtatttttagtagagacaaggtttcaccatgttgaccaggctggtcttgaactcctgacttcaagtgatccgcccgccttggcctcccaaagtgctgggattacaggcatgagccaccgtgcccrgctggacaagtgggatttctgaagtcaaacaggaaacttgaacacttagttattttttttccagagataaggtcttcttattttttattttatttatttattttcaaagacagggtctcactctgtcatccaggctggagtgcagtggtgtaatcatagctcattgcaggcttgaactcctgagctcaagcaatcctacctcctcagcctctcaaggagctgggactataggcacaggccaccacactggctaatttgtttattttttgtagagatggtgtggggtctcattatgatgcccaggctcctctccaactcctgggctcaagcagttcctctgcctcggcctcccaaagcactgggattacaggcatgagcctctgcacttggcctgcttgcttcttattaagacatttctctcttccttaagtctcagtctcttgaagtcttggggttcaaatatagcataactgagaggccgtgcatatagagcagaaaagaaaaaagtttcgccggatgcaattcctcctgtttggtggaaatagacaagggatagggtagtcagtgagcacttgctgaacattgcctatccttccccttcttgctcctgggctctcctctctgcaccctctgccacggctctagcctgcttgtcctgatggcagtgaggtttgtatctcaggccacctctgctgtctgaacctccattctcatgtgcttcaattttccactggactctgacgccatctggatgtcccacggatgcctcgtgtaccacatgtgaagaatggaactcattgtcttctcacactctcttctgtatgccctgtctttttgggcagtgttatcactcacctggaaactcagttttgctcagttcctccttctctttcagccttatctcttgtttatctcctaccctgggatggtatctcttaaacaaccctcaaatctctccattccttttgatcactgaccgctgccttaaaataagcttcctgccatctctcgcacaggctgctgcaagaattctgcaacaggtctcataatctgcctcagagcccggcctttatcctcctttaattgccatggaacctttaaaaagttcctatatttggccaggtgtggtggctcacgcctgtaatcccagcattttgggaggccaaggtgggagaatcatttgaggccaggagtctgagaccagcctggggcaccatagcaagaccccatctatacaaaattgttttaaaaaattagctaggttagtgtcacgcacctgtaatttcaggtacttgggaggccgaggcaggaggattgcttgagcccgggagttcaaagctgcagtgaatgygctgtgattataccacyrcactccagcctgggtgacagagtgagaccatcccttaaaaaaaaagttcctacgttcctacattctcagacccagtgtcctcgtttgtgaaacagagattgtaataataccttccccctgagcttgtcacgggattagatgagacaatggtagaataaaagtgaaaaattgctaaattgcccaccacatagtgagtactgaataaatggttgctgtcactactgttagtgcctggggtcagtccttgtgctgttattggccacacttcagatcttgttactttccttctttatttgtcacttatagataaaaagctaaagtcaagggacctagggctgcagaatgacttttgtgggcccagagactttagcctagatgggctccttcctccatataaaatactaaaaattagattttatgaccctgtttctatgattgtcttgagtactctctgaagagcttgtaatcttaaatggcaattctctgatctctggagactgtgtaaattcagacaaacatatgtgtagtctcaagtcctggattgcaatttttgcccctagttctgagcatatccatcttcttgtttgtctcattacgctgttccttggatttggggaaaaaaaaaaatccagtctttcagggacctaaatttttgcagatatttcagtttcaatgatatttctcaagagaacccaaaatctcatatcctgtgcacgcttgagctctgaaactgcagcttttagttaatgagcaactcatcctctccctctctgagagcagacatagactcaactccgattttaacttaccttgaggagtttccctttctttcttgcaaggtcacctatatattttaaatattttaaaatcgttttattgagtgtttttaggtatcttgctggaaaattctcatgttggatagcctttcatcttgctgtgaatagaattgtctatcataagtgttcttttcttaacaactggtttgagtttttgtttgtttttgtttgtttgtttgttttgtttttgtttttgagatgaggtcttgctttgttgcccaggctggagtgcagtggcgcagtcttggctcactgcaacctctgcctcctgggttcaaatgattctcctgcctcagcctcccgagtagctgggattacaggcatgcaccaccacacccagctaattgtatttttagtagagacgggattcatcatgttggccaggctggtcccgaactcctgayctcaagtgatccgcccrcctcagcctcccaaattgctgggattacaggcgtgagccatggcccccagccatactgagatatacagctcatatcactcatctatttaaaagcgtacagtttagtggcttgtagtatcttcacaaatttgtgcacccatcaccatgagctaatgctgtcacattcccattactccaggaaaaagtgctatacatattaacagtcactgtccattttctccccaagttcccccttccctactgaaagcaaccatggatctactttcaggttatacagatttacctattctgtacatttcacataaatagaatcactatatggtcttccgtgactagcttcatttacttgtcataacattttcaaagttcactcatgccatagcttgtatcacaacttcattcttttatattgcccaatattccattggtctggagatactatattttgtttctccagtcatcagttgatggacatttagctaataagaataatgcaactgtgagcatttgtgcacaagtttttttggggacgaatgtttccatttttcttgggtggaaatttcttaggagtggrattgctgggtcatatggtaactatatttagcattttttgtttttgtttttgagacagagtcttgctcggtcacccaggctggagtgcagctgygggatttttgctcattgcctcctaagtagctgggactacaggtgcacatcaccacactcggctaatttttgtatttttagtagagactgggtttcaccatgttggccaggctggtctcgaactcctcaggtgatcacctcagcctcccaaagtgctgggattacaggcgtgagccactgtgcccagcctatattaagcattttgaagaacagcccaactgttttccaaagtggcgggacaactgtacattcccactagtaatgttgcatcacaagtgattttaaaaccaagcacaggtgtttgtactcaacatgggaagaatctttgtggagttttgagcasagttyaggggttgtcatttgaagatgtgttacacatcagtgtggaagcagattcagcatgagggagcaggtagaaagtgctggagtactctaattctccgccgatagggtctctatggagatggtggcagcaagaaaagataccaggattcctgaagagcatattggacggtggaaatgattctcaagcagagaaatgatgctcgtctgacggtgctcgttcaacctttgcttttgatcttggtattacagaaaataaatttctgttttcagagaagcaggagagggaatacaagctttgccactaggtgatggggaaccgtctcactaccggagcaggtttcctggctcttgacttgcttaggggatgtcttcgtgggagatttggatccttctgggcgcttccggctgcccaggctgtgaaagccaaggaggctggtccttctttctgtcagtggcagcaatgaaacactggatattggatctccatcatttaaatggataaaktggtgtgtgtgtgtgtgattgtgtgtgtatgtgtgtatgtgtgctgagtagctggaacatttgaaatggcagaaggcaatgagaacccttaacaacaaaagttttctagttaagtaataaaacctcccataactccaggatttaaaaattgcccatcaagctgtttatcctctaatggaataataggtttaaggtgtcaccatcctgggagcttgcaattgctcagtgaggcttgttacagaggcctccaagtctacttggcactgttatcacccgtgtgggttttttcctctcctctgtgatttattctcaaacattttgtatttcctcttgccatttagataaaatttaaataaaaccattagggaaagagctgtgtcagaatgttggaccctttaaactcaagataaaaatcaatctgtatgtyactttctgttsaaatgaagcaaaagcatctgcagtttggcagttatctgtgacttgctgtttttattctgtgctatttcttcttgctgtagttcctcctagcaaaagggaaacaggcgtgaataatggccccagttctgtctcatttcctgtgtcctctttcgtcctcatttctcccagtttagatggtctctcccttttacagacccccatctcatcccagtccccaaaaggagagagaggattcttttatatttatttatttatttttttgagacagagtcttgctctattgcccaggctggagtgcagtggtgtgatcttggctcactgcaacttctgtctcctgggctcaagagattctcctgcctcagcctctcgagtagctgggactacaggtgtgcaccacgacgcccagctaatttttgtattttttggtagagacagagggagaggattctaaccagactttaaccccagaactctctgtgaccttgaccttcctctcaatggaaatgttttcagggcctatacctgagttggataaattgaggacatcattttttctgtgacaagtaatgttaaaatgtctgttgaagctgcagcggagattgagtaatacatcctggtatggtggttttctaataattcttttttctcccactttttctaggcttatccaaatcccttgggctcattgaaggttatggtgggcggggtaaagggggccttccggctactctttccccggctgaagaagaaaaggctaagggaccccatgagaagtatggctacaattcatacctcagtgaaaaaatttcactggaccgttccattccggattatcgtcccaccaagtaagttctggttcagtcatttgcggagcttgatgggtcgtcagagtgggtgtagacccctacgtttgtgatattttccactgttatttgtaactcttgggggagtttttattttagtttcctctttaataaataaacttagtactcctgttgcatatgaaagattagctaaacaaaaaarttcagttgttatcaaagtgttccagaaacatatagaaagagcctcaatacaaaaagctttgtattttaattcttcttcttcttcttcttcttctttttttttttttttgagacagagtgtcgctcttgttgcccaggctggagcgcaatggtgcgatctcagctcaccgcaacctccgccttttggggtttaggtgattctcctgcctcagcctcccgagtagctgggattgcaggcatgcaccaccacacctggctaattttgtatttttagtagagatgggattttatgcctttggtcaggctgatctcgaactcctgacctcaggtgatctgcccgccttggcctcccaaagtgctgggattacaggtgtgagccaccacacccagccattattattcttttaatgtttattttatgttcaggggaacatgtgtaggtttgttatataggttaattgcatgtcacaggggttcagcgtacagatcatttcatctcccagataacaccatagatagtttcttgattcttacccttctccctccctccactttcaagtaggcctcatgtctattgttcccctctttatgtccatgtgtactcgtcrtttagccccgacttataagtgagaactggtggtatttggttttctgttctgagttagtttgcttaggacaatggcctccaactccaggttgccgcaaaggacatgatgtcattcttgtttatggctgcgtagtattccatggtgtatatgtgccacattttctttatccagtctactattgatgggcatttaggttgattccatttctttgctacagtgaatagtgctataatgaacatacctgtgcatgtgtctttatgatagaacaatttatattcctttgggtatatacccagtaatgggattgctgggtcaaatgggtctgctttgagttctttgyggcttcaccaaattgctttctacaatggcggaactaatttacattctcaccagcagtgtataaccattaccttttcttcacaacctctccagcatctgttattttttttactttttaatgataaycattatgactggttgaaatggtatctcattatggttttgattttcctttttctaaaaaaaaatcaccatgatctcatcccttggggacagcatctattgaagttttagtgtattgtctttgagtctattttctatacagattatgagcctatgatatctcactttttccctttttcatttaacattaaatcrtgagtattttctgatgttattgatgatctgtttccattgttggaaatttaggttattttcaatttttcattattatatataacattctattgaatattttttcactcatatctttatatgttttgatttgatatttattttctgaatccacacttctaaaggtatatagtagagrgatatttttggagattcttgatacgtattataatattttcctccagaaaatctatagtaattctactcttgttagaattttactagacccttccaatactgggtactagcatgtaaaaaatgccaaactgataggttattgtttcaacttacacttttttgcatgagattcttgccttttaaaaagcgtgaggctggcagggcacggtggctcacgcctgtaatcccaacactttgggaggctgaggagggtggatcacgaggtcaggagttygagaccagcctggccaagatagcaaaaccccgtctctactaaaaatacaaaaattggctgggcgcggtggcaggctcctataatcccagctactcgggaggctgaggcaggaaaatcacttgaaccagggaggcagaggttgcagtgagccgagatcacaccattgcactccagcctgggtgacagagcgaaactccatctcagaacaaacaaacaaacaaacaaacaacaacaacaaaaaaacttggggctgagtatggtggctcacatctataatcctagccctttgggaagccaatcgctttgggcagatcgcttgagcccaggagttcgagatcagcctgggcaacatggcaaagcattgtctctacaaaaaacctaaaaattgcgaggtgcggtggcctgtaatcccagcactttgggaggccgaggcgggcggatcacgagatcaggagatcgagaccattctggctaagatggtaaaaccccgtmtctactaaaaatacaaaaaattagccgggcgtggtggcgggcgcctgtagtcccagctactcaggaggctgaggcaggagaatggcgtgaacccgggaggcggaggttacagtgagccaagatagtgccactgcactcctgcctgggcgaaagagcgagactccgtctcaaaaaaaaaataaataaataaaaaataaataaawatatatatatataaattagccaggtgtggtggtggtgcatgcctatatagtcccagctactcctgaggctgagggtcacctgagtctgggaggtcaagtctgcagtaagccatcgtggcaccactgcattccagcctgaggaagagagtgagacactgtctaaaaactatttgtgtgcatcttggttggattatgagaggtctttattttgtgctctcagatttaagaattacttattttctgcttgtaaaatagacaaaagaggatggacatagtgtcaagatgctggagagaaaacccctgtgttccaggcagaactccacctccgcttctcaaacagattctccattttctattagatttgtagtgtctctctttttctatttagagtgtgtccttgcttgaagtagattatttctttctcaaatgaattttgtacaaatcagttaagtgtcttggttactgagaaaaatagattcaaaataaagaaaattatcttaaatggatttaaatttgcagcattagctgagaaacctgttaaatctctctctctaccaaataagcatgtattcatttagaatcactaggaaaatatacatcacccctgctggaagctattttrtgtccctggacttttgctctccaaaacatctgtctgtttttatttcctgatgctctctcattagcctttcttattaggacattggcaaataaacatggccctatttttttgtacttctataagaatgaaaatgccttcaaaacgaggttactggaaaagagccggttgaacaagtattattgagcacttattatgagccagatagttttctccccactggagatagacacttggatgaagcacagtccttgcctacttacttcttgtctagggaggaagacagatataccagcagatcaggtcagcacaagggtatgtgccggctagagattcacacagcatgtgcagtgaggatctgagaaagtttcttgtttgagataatgcttgaaggaccattaagggatagaaagttgaagatggggggccaggcgtggtggctcacgcctgtaatccyggcactttgggaggctaaggcgggcggatcacctgaggtcgggagttcgagactagcctggccaacgtgatgacaccctgtctgtactaaaatatacaaaaaaagaagcggggcatggtggtgcacgcctgtggtcccagctacttgggagactgaggcaggagaatggcttgaaactgttaggtggaggttgcagtgagctgagatcatgccactgcactccagcctgggtgacagagtgagactctgtctcaaaaaaaaaaaaggaaaattgaaattgggagagggataagggtggaccaggcgggagaacaaacagaaggagcacacttggttgggtatgacgtggcatactcagggaggaacccatggcccaatattgccgtgtgatgtaacatgatggcttgaacataccatttacatgtgaaccttcctgaaaccctattaaaatgatagcaraggaatagagagaatggcaacttacaaggaaaaaaaaccacaacaggttgggtgatgatcacagggaagagagacatgtacaaaattttggaagatggaaagaggatggtaatggcaactgacagagcaagctgggtgaagctgagacccaacctcccacatgaggtgggtgggggtttgtaagagcagaagaatgcagtctagccagaagcccctagagactcaagaattggagatgacaggcatttctgatggccgggggaggggagcagatttgaacagaagggatggttagcagttatgtccccagatcctttcttcaactctgcacagccagagactgccctttctcatctggcagmatatgggaggtttactccctagagaagatgaactatagttcatagaggtggccttggacagaggataacaaggctgcatatgaaatgggatgacttcccagctccattacccctctagtctctattactcctgtaagcaagagtttgaagaatccacttaaaattattcagcctaaggaaaaggctgatagatctgacagctggtggtacccctaaaatggctgggttctgctcattaactattagtatggcatgcgagttgtaaggcttcatccttttgcataaagcagtcctgctctaaaataagaaaggaaaggcaggatcactagacatctcagtagagtctttgttataaaagatgttaacaacaacaacagaaaacagtaaacagaaacaacaaactttgtttctgtttaatgacttaggagatcatagaatgttttgttttgtttataaaccaagagcaaatagatatattaagataataatcataaggccaggtgcagtggctcatggctgtaatcccagcactttgggaggctgaggtgggtggatcatttgaggtcaggagtttgagaccagcctggccaacatggtgaaaccctgtctctactaaaaatacaagaaaaaattagctgggcatagtggtgcatgcttgtaattccagctacttgggaggctgaggcaggagaattgcttgaacctrggacatagaggttgcagtgagcccagattgcgccactgcactccagcctgggcaacagagtgagactgcactgcacaaaaataaatcatagaataaaaaataaatcttaaaagttaaaagttagacctgtagtcctagctattcagaaggctgtgacagtaggaacacttgaacctaggagttagagtccagcttgggcaacatagcaagaccctatctcttawaaaacaaaaattaaacggagataagtaatttaataaagagttggaagacagcattgagaaaagttctaaaaagtagaaaaaaagaaatgaaaattaggagtggaaagatcaaaagaaattagatcagtccagtaggttcaacatccactaatgagaaaatcagagagaacagagagaagaaagtcatcaaacaaatgatgcaagacaatttcccagaatccgtaggatgtgagctttcagattagaagatcccacccagttcctacataattcatgaaaagaaaaaaaactaaactcacatcaagaaatgtaaatttaaaatttcaaaacaacttggatgaagaaaaagtcctgaaagctttcagagaataaatgcagattacatatagttggcattagattcctctgtagaaacattagatgacaatggaagaatgcttaaataattttgagagaaaaaaataatgttccatttagaactcttaacagtcatctatagaatrctttgggccaggagcaaatgcaaagtaaacccatcgcaaaaatgtaggctcttaacaattttacctcctctgaatttgttttgaggaagctactcaagcacatgctccagcaaaacaaaggagtcaagtgaggaagatgatgaagagatgctccagggtaacattctagggtgacagccatgtagcagaccaagagatcaattattcccacatctttagagagaaacctcctagaggctcctgtggatgcaggaggatgcagggctccaggaggtatgtctctaaaggaggtgggaagtggcaacattgtttgattgcctagagtttktgactacattaagattttttcttaactcctcgttcaaaaagcttgggactgtttactgattgtgttaggccattgtgttgctataaaggaatacctgagactgggttatttataaatataagaagtttaattggctcacttttctgcagcctctccaggaagcatggtgcttggcttctacttggcttctaaggaggcctcaggaagcttacagtcatggctgaaagcaaaaggtgagccagcctgtcacatggcaagagtgggagcaaaagagagagagagtgggagatgccacacacttttaaacaacaaaatctcatgtgaactcactcatcatccagaggatggcactaagccatttatggagatccacccccatgatccagacacctcccactaggccccacctcccacactgggaattacatttcaacatgagatttggctgagacatgcatcccaaccatattactgatagacacaaaacagcttgtgaaaaagcaaagcaattaatacagaaaaaaaacaaaagctctccaataaacaaactatacttcccatatactctgtagctcagctctgagcaatatattgtagtcatataaatgtaaatatttcatattgatttaaacacaaattatggtataattattggaagaaggaggaggcaaaatgtgtatgtgaggtgggggtttgtaagaaaactaaatctacatcttcagtagcaggaagtcaattgaaaatgtgtattacacatcaagaaatactaacataatcattgttatttagcaacatggagattacaggagttgaaggagactgtgtatgttttattttaacaaaatttcaattaaacaataaatataaatctataccaaaaaatgcaagatgtgtgggatgaaagtacagtagaagaatgagttggagaactagcttgaatgatatgatcacatttagattattctggccactatgtgttrggtaaatttgaaggtgaattttgagataaatttgagagcccataggccataggcagtaaccagagagactgttgtaaattctgagctccacagcaaaagttaccaaattaacctctcttcattgcaaactaatcctagccatcaaagagttgtaaggctcttgcctgtagaagcaactttgctgatatctgagccctggagatgtaaggagaggcagctgcctggggctgagcagtttccttcctccagagaaattattccccaatggataggatcctttttgttaagccccagacagctctcacaagtttttaagaagctttaagtaggctaatttcattgcaattttaaacagaacctcaagttgctttaattcttactgttttattgctatattacacttgagaaaattgtttttcttataaatatgaatgaatgtttaggtagcagtgagrttaaccatttgtttgtcacatttcaggcaaatgaattccaaaatgctgttttccattttgttttaattccgtgactattttttttcttccactggacagatattttaaacttgtatgaatcccaagctgtcagtctttccattttcatttcttccctgctttaaagtgtaaaaagatattatccctcagaatacttataaatattctattytgttttgtgttgcttttctatgactcttttatatttcacccttccttctagagtttattttggaatatggttcaagtttgcatcttktgttccaaagatctgtccctctttttagagaagagctttttcaaaataatcttataaataacccttctctttctcttatttrgaggtgctaaatatrttacattttatgctttttgtatataagtaggcttattttctctgtggtgttcttttggtctgtatttctttttttttcttcttcttgtcctttcttggttttgtagaaattactaaaaatgattttttgactaaagtctccaatctgccaggcactgtgccagcagtttggagaagagcaaggcatcttggccccagaggacttcaaagagagtgggagaggctggtggctatttatagtccttttggtcacttttagagggccttagaaagtaagacaagggcgtgagccattctgtgggaggcagaaggtgaccttgatcttattggcaagcaggagttttccctctaaaggggaggcagggcatttgagagagagaacagcaagtgcaatgataagtagctcagcttgtgaaaaagcaaagcaactattaactacaggaaaaaaacaaaagctcttaaagaaaggaattgcaattccaggcactccatgrctcaggggacagttcttggattttgggattaggggaaatggaaaacttttggctagagaatagtttccagattgaattgtggaagaaaaatttggagtggaaggaggaaaccaggctgggaagtgcctcatgttctagccctgggtggggactttcacattttcagtagatgccagtaaaagattagagtcaggatggtattattattataatttcttttttttaaataatgataactgtggcagaaatgtggagaattgaatggagaagatggaggctggtagcaggatggctaaatattaagtcatggttaccaacgtttattgagtgccaactgtgtgcgagacattgccagagagagaagaggggtgtttttaataatacagcaagcactttattattattgtgctacttttatacaattgttttcctgtaacaaactaaggactaagcagggataaggtggaagagctggattcargaaaatcctagagagaattagtaaaatgaggcaactmattggaaatsgatgaagtgggtgcactagcttgggagatggagtggaagtgatcttgttaaccaggagagagaatgctgtaggggttcacgttttgtaaggaagacagcagctctgcttgtccggcgtttcccaaagtattggttttcttgagtaaccacaggacataatctgtctggctttatttatgatttggctctgtgtttgtaagaagataacctttggtgacaccagaagctgggcaaggctttctaagcccccactgtttttttkttgttgttgttttttgttttttttttttgtttttttttgctgagacataccattctatatcacactgtggcatagtaattatctgcttttccgattatctcgtactgtgagggagggaccacagaaatctgtctgtgcttattaaagccactgctgagatccccgcaccaattttatgatatgctttctcctctcaaaccatgtaggtaatttatgagcggtttctactgctgttatcttcaatttctcctttggcctcctgcttataaatccagatgtcaggtttctttggaattcattttgcttcactcagaaagtctcctctttctttcagcacaacaaattctaacccattttatcccgacaatgtctgctttggatgcggctggcatgatgaccctgtggagcatcctcatgtcatgcccagtgaacagaggcatgttgtggtctggaggtcaggaatgatgtctgggctgaccatgggtatttgagaatcatccaactccagtgggtattttaggttgggtctgtgtgcatgtgactcgtatgtgtatgtgagtcctggtcttataatgaatgagtggagcamatctactcatggctcaatacccaactcaagtttccctccgctgtgaaaaggacacatctgattatagtagctgcagtggagctttttttatatgaatcattcctctaacaatagataccctgtgtctcacaggtcggtttttatatagggtgaaagtgccttaaaaagagtcaagaatccagctgggtgtgggggctcatgcctgtaatcccaacactttgagaggctgaggcaggaagatctcttgaggtcaggagtttgagaccagcctggttaacacagtgagacctgtctctactaaaaattaaaaaaaaaaaaaaaaaaagctggatatggtggcttgtgcctgttgtcccagctactggggaggctgaagtggggggattgcttgagtccagagtccaaggctacagggagctatgatcktgccactgcaccccatcttggataacagagtgagatgagtgtgtacatgtgacagtgtgtgtgtatatatatttatatattatacttacatattatatatattttaaaaggtcaaaaattctatgttaaactttctttttcacagactcacatggacacagagagtagctgtccaatgagtaataataataagtagctgtatgcttaggagtgtccctgaatcactaaccacaataatttttcccttttattgactaccttttatgtttttgtcgctgtatggcatgttttattgatctcatttaaatttaactgctctctgaaatagctattcccatcccttcttttgtaaatgaggcaaggtggccttggagaggttaagcaacctgcctgaggtcacacagctagtaagtgcagggacctggattcaaacccagctctgtgtgtatcttcaaggtctgtggacgtccccacatcaactgcctaaccttctgtgtctgcagaatggaaccttctcctctatgatggggttgccagaaggaaaagaaattctgagtcttacagcaagtggacagtttatctagggaatcttgcctgttgggggggcgggggtgggtgggtgggtgggtggagttacttctttagttttcctctcttggtacttttcaattctttcgaagctaacaaaattccaaaggagctttatgttaaatttgagtagctattgcctgtgatggccctagtatgtagtgtaatacagttgaaaccctctttaaggcatacagtatttttttttttaaataaaacatgggaaagaaaaattgtataatattatgtggcttaggaaatgtcttaccatagagtttataccgaggaggaacgttatttgctaacgcaggtcttcacgcagcaatgggatggaagagtggagtatgtaagttgaggggtgccctttcctttagtgtgtgagggtgatatgattcctgcagtacttatgggtgaatgttcatcccacttttgcagattccctaggtctgaagaagatatctgggccacctaaaaaccttcatgagagagttatacgtgaaggttaagagcctggattcagaaatctaacttctaatctcagctttgtccctttctagctatgtgaccttgggcaagttgcttaacctgtctgtgcctcagtttcctcatatgtaaaatggtgatgtaatcatatctactttatagaattgctgtgtggattaaattttccacgtgaaatgtatagaataatatacctatacrtttcacacaataatatacctatacatttcaggcacaagccaccacacctggccataccccttatcatctttaaaacaccttacattaaatgacaggatcttcaggaaaatatctactgaaaagtgatatatccttagccttgcacttacatggaaaactttaatctaggacaatgggcatttccttgtccccaagcagcacagaaatccagagggtccagcctgagacagatgccagggtgatggtgagagtctggggagggtattttccttcataaggttcttcccaggcctggatcagarggggcagctgtggattccccacagccaacatattgaggaagattcagccctcactagggatgttctgaggtcatgggagactttgtgaaagttggaggatgggctcagctacctcctgcttctgcttcctccatagtagtcagaccagaagaaaaaaaaagtataatgtgtgtttttcctcttttcaygatttgattttttccacatattgaagtratttttccttgaaaaggactgaatattaaaaaatacattttatgtctgtaatcctagcattttgggaggccgaggtgggtggatctcttgaggtcaggagtttgagaccagcctggccaacatggtgaaaacccatctctactaaaaatacaaaaattagctgagcgtggtggtgggtgcctgtaatctcagatactcagggggctgaggcaggagaatcgcttgaacctgggagaaggaggtggcagtgagccaagatcacaccattgcactccagcctggaccactgagtgagactctgtctcaaaaaaaaaaaaagaaatggatgctcttgagacttaactgtgtaagaaagaattcccacttcttttagaggcactgccagccccaaaggttatgaattggcaatgttaattagatcttttcttggaacttgaaagtattctcacctgaaatgcgtttaaaacaaagttaccatcaagattcccctctgtttctttctagagagctttctggacaagtttcaatgtctttcatggagaatttgaaaccagtggatagaaagcagtgtcaaccttgtcctgtttatgcaaatggatctgctctgtcacctgtttataacccccggggtcattgactctcaagttcacattccccagatgtagatgcagctatgggacatggaattckcgatttattagtttgaatcaaaccaatgttgagatttacagtactggctgttgttgcttctgctggcctttgatagtttaagtaaggattgtagacagatgagagctgcaggaggggctagctcatctcatctaatattcagaaatcctcacactgttactggggacttgagagttggtacttaaacaacctttgtgtttctaggggattatcctgtctgcctagtccattgcttcctcactctagcagtgcactgagttaaaaccaacccatcctaaacttgcctccaggcgtctacatgggcacacacacatccccacaccctacaaggaaacccaagctggtttatacaagctcactttaggcagtttgccaaattmtactccgattcgttcagtggacagatagttacgtgaaatacttgcagtacgggaaacatttgtttctcagccctggggataatcaatagaggcaaatgcctttgcaatcacaaygcctgtttatgtgtggagttcttcrttgttcttggtttgtgagtacagtaaacattctccaagtggcagcaggagagaaccacggtgctttcgtaacaagctgagatttacaggcttgtaagagctggggktataaatcaggcttctggtggaatgggtgaaatggactaaattcaagtattaatgggagagccacgtgtgcgctgtgcagggagaaaggctcatcagtattacagatggcatgtccctttagttaatttagaagaaattccgatcasccaacagarctctgaggatggatgcaggaaaaagaagactgtggcatatggagggaacatatttgttcttggaaaatcagtagaaaatgtttaatgtcatcataacctcatttgcataaaaatagtcacatgcggtaaaccagataaaagcaaaggaagacgtgacggaaccaatgctgtttggagtttcgtttcrttatgaataacataaataattcaattgaataaataaatacgaaattgctttaagtagatgtactacaagtgattattccttgaaaattccttaatggtacgtgccccaatgatgaagcaatgtgattatgtctccatgggcagccctttgctggacacttgacccttgacaataatattgagctctctgtagctctcaagtgttttatgaacacaaatgaagtttttagtttcacaatcttattcataaacatgatcttgaagttgtttaaatagacttatcttcattgtgatgaatgcagccccactttgcacatggttgcgcttaggcaatattagataatcagaagtttgaagagtcttgggctgtgcggtactagaaacataattctaaataaatatttggaaccctggtggcagaatttgagctgttgtttctgcctcacagagtctggtcaggggaattcttgtgtaaggacaaattgtggcatggataaaattgatggaaattatttatgagttaaataaaaataaagaaaggaatttatttatgatttcaacaaatgttttctagggttttgtagaaagccatgcacaggtactatgggagctataacagatgtgtatgacacagtccttgtactcatttgattttattcattcactcagtaaatactcgtcaatcagctcccacacaccaggcactatgttggaggttgaggttataagggggagacagatgataaactgggaaaaataaacacgagctaattatagattgtgataaatgttttgaagtaaatgaacaggtgctaacatacatctgacccttaaaatccctgggttttacatctgcaaattcaaccaactaaggatgraaaatactagaaaaaaaataaaaataaaaaatagcaatacgacaataaaaaatacaaataaaaaaacactacagtataatgactatttgcatagcatttgcattgtattacatattataagtaatctagagattatttaaagtatccaggagatgtgagtaggttatgcgcaaatactataccattttatacaagggacttgagcatccttggattttggtatccatgagggggttctggaaccaatcccccttagatactgggggacaactgtagagagtaaatggaaacaagagtgtactttagagaaggtgaattgaagaggcagaagagatgaggataaaacagcagctcaaaactctggcagcggctgggcgcagtgagtcatgcctgtaatcccagcactttgggaggccaaggctggtggatcacttaaggccaggagtttragatcagcatggccaacatggcaaaatctcatctctactaaaaatacaaaaattagctgggcatagtgttacacacctgtagttccagctactcaggaagatgaggcacaagaattgtttgaacctgggaggcagagggtgcagtgagccaagattgagccagtgcactcaagcctgggtgacaagagagaaactgcatctcaaacaaacaaacaaacaaacaaagaacataagtaaataaagcctctgtcagaaaacctctctggacagaaaraatagtgcctagaaaaccctaagtttggaatgggcttgatttaggaactgatagcagatactggccaattgtttgagggtgatggaagggaggtaggaaccatagcatgtgggattgtgggcaatgaatctgggatttatttcaatgggaacaaaagtgatatactgggttgataatatacccccaaattcaagtccatctggaacctcaggtcaccttatgtggataacagggtctttgcagatgtaattagttaaagtgaggcatacttgattagagtgctccctaaatccccaagatggttggtatcttaagaggagaaaacacggagactaagacagagacagaaggaaggaggccaagtgaagacaggcagagattggaatggagcatccacaagccaaggagtgctgggaattgccagcaatctccaaaaagtagggaaggcaaggaaggattctcctctagagccttcagagggtgcatgcccttgctgaccccttcatttgggacttctggcctctagaaccatgagagrataaatttctgttgttgtagtgcccccattttgtggtactttgctatggcagcctagggaacagatattaaaggtcatggtagccactggggatttgacatagcgaagtgtcctgatctggggtatgtttttagaaggtcattctgaatgatgtttggagaatggattgcagagwgcagragagatgtaaggagtccagtttggaggatagtgctagtaggagatgatagtgattccgactagggtgtgcctagtgatatgtgcctagtgatttggctgtgtccccacccaaatctcatcttgaattgtagctctcataattcccatgtgtgagagggactcagtgggtgaaaattgaatcatgaggtcagtttcccccatactgttctcatggtagtgataaagtgtcgtaagatctgatcrttttataaggggaaacccattacacttgactctctaattctctcttgccgctgccatgtaagcagtgccttttaccttctgccatgactgtgtggcctccccagccatgtggagctgtgagtccatgaaacctcttttactttataaattactcagactcaggtatgtctttatcagcaacatgaaaaagaactaatatacatagtaagatgggaagaagtagagatttatggtggaggtcatcaaggaatactactgggttttaggttgcaacatatgggtgcacggtagtgccatttactgaagtggtaaaactgaaaaacagatttggagggctctttaagaattctacttgggatttgttaagtttgatttgatgtttagtcatatattgggagatatcaaatagatggttgaacaatttatgaatctggagcttgagagagagataggggttgggagatagacctttgaaggcatcaacatagacgtgaccatcaaagctgagatcactaaggagagagagctggagatgtggcagcagcccaggagtgagtgctgtgccactccaaaatttagaacgtgggtagaggagagaaattcagcaaaggatgtggagaaggaacaactaatgaagcaggtagaaatccaggaaaaagaagtgacgtggaagccagaaaaggagtgttccaggaggaagcagtggttactggtgatgagcgatagtgagatgccagaatygttcagcagatttggcaacatgaagttcattgatgacctcaacaaggatattcaaccctgattggggttgattaaggagtgaatgggagggaagaaatgagagagcaaaatgactactctgatgaattttattgtgaaagggagaagaggcatgctagcctgagggctttggggggtgggggtcaaaggaggttattattattattattgttccttataaaattcccattttgtcataacataagagttacagaaaagttgcaagaatactacaaaaaattctctattttctttatccagtttccttaaaggttcacattttacaatatttatatatctccatgtgtatatctatttttttctgaatcatttgagtgtgagttgcagacatgatgcccctttgtctctgaatacttcagtgtgaccaacccaagaacaagggcattctcttacataaccacaggacaatatgatagtattgcctatccacatttcaccagttgtctcaataatgtcctttacagaaaaagaaagtcctagatcatgtattacattcatttatcatgttttattttgaaacagccctttagtctttgtctttcatgacattgacatttttgaagatgacagtccagttattttttaaaatgcctcttaattcatatttgtccaatatttcatcagaattagattcagaatgtgcttttgtggcaggaatactacaaaaatggtgttgcatctgttgcatcttatcaggacacacatgagggaaaggaacagctaatgaagaaggaaaaaattcagaagaatgtagtgacatagaagccactcattacttgtctcattactggtggtgataatattgattcctgggttaaatgtggtgtattaatctgttctggcattgctataaagaaatacctcaggctgggtaatttacaaataaaagaggtttaattgactcatggtgycacaggctatataggaagcatgatgctggcatctgctgggcctccggggaggcctcaggaaacttacaattgtggcggaagatgaaggggaagaaaggtttctcacatggtgggagcaggatcaagagagagagagaaggaggtgctacacacttttaaacaaccagatcttatgagaactcactcacagtaccatgggggaatggtgttaaaccgtaagaaactacccccatgatccagtcacctcctaacacaccctacctccaacatcaggaattacaattcaacatgaaatttgggtggggacacagacccgtactatatcagatggtgtctgcatggtagtcaattatgtttcctaatacctccaggacaatgttgaattagtggagrtagtgggaacccttgcctttcctgtctttgacagaagtgcctctagtgtttctcattaagtaagatgctatctctatggctatggtatagtttattgtgttaagaaagtattcattagttttaatgatcttgagggttcttttattaggatgggtgttgaattttccaaactcatttcagttttttcagtaactataccgaaaatcatcaatttctttcttcctatgtctataaatattttgcattataatagtggatttcttaatgttaaaccaaatttatattaatggaatttattccattaggctatggtgtattattttcttaatgtgatgttggattctgttcactaatattttatttacaacttgtgcatcaatatttgtaattcattctctctctctctgctttccttaagaagtttaattattaatacattacaaaaggaattaggttttcaatcctctggaacaatttatggagcattatgactatctggttcttaaatgtttagtagaagtcacctgtgaaaccatctgggcctgatgttttttatggggtagtttcttgatggtttttgcaatttttttcctgaggaaatagctctgtttaaggtttctgtctctaatgaygtcaaccttggcaaattgcctttccctaggaaattatccattacatctaggcttttaaatttatttgtakagggatctgcaaatgagtctttatttttatttttaacagttatttgtttcaatgattatttccccctttggtttcttatttatgtatttgtgctttctcttttttcccataagttagttaaatgtggtctactttgttaattatgttttaaaaaacagaattttgatttattcaagatcttgtatttttctattctctgacttattgagttctgctttttatgtttattattgccttccttgtattttcttttgacttactttgttgttgttttcctttctgaaaagcattctaagttggaaatgtaattcaagtatttttattgctaaaaggttttaaggctttgaatgtttttcttcttaatgcttaaaacttcccactgattgtgatatgtggtgttttcattaccattattttttagaaatgctttaacttcggtttgtatttaccttgtcactcaagacaggtttagtaggtttttgaaatttgcagatggataactttttaaaaacattattaataattttamattttattgcatagtgatcagagagtgtctttttttttttaagatggagtctcactctgtcacctaggctggagttcagtggcatgatctcggcccactgcaacctctgcttcccaggttcaagcaattctcctgcctcagccttccgagtagctggattcacaggcgtctaacgctatgcccagctaatttttgtgtttttggtagagacagagtttctccatgttggctaggctggtcttcaactcatgggctcaagggattcacccacctcagcctcccaaagtgctgggattacaggtgtgagccaccatgcccagcagattctattttacaactgttcccctgaggttgagaagatgtgttgcctgttttctgagagcagtgtgtatttctatcacatgaggcattctgattttcygttttcactttcttctcgatatagttactttgtatatacggagtctgcttcctttttttttctgagacagagtcttgctctggtcacccaggctggagtgcagtggcgcgatctcggctgactgcaacctctgcctcctgagttcaagcgattctcctgcctcagcctctgagtagctggaattacagacgcccaccaccacatcaggctacttttttggagttttagtagagatggggtttcgccatgttggccaggctggtctcaaactcctgtcctcaartgatcctcttgccttggcctcccaaagtgctgagatttgcttacattcattaattttgttgatttgcaatgattcacaagatttgtagttcaaagggaccattgtctgttagtgtcacaagtacggtgcctttgtctgtgttgctgtcaaggaatacctgaggttggataatttataaagaaaagaggtttaactggctcacagttctacaggctatacaagcatgacaccagcatttgctgaggttctgtcaaaggcctgaggctgtgcccactctcagaggagggtgaaggggagccagcctgcagagattgcatggtgagagtggaagggagagaggggtggcaggtgccaggctcttttcaacaattagctcgcagggaactctcttgagaactcacagagtagagaacttactcactaccatgaggatagctccaaggcgttcatgagcggtcggccccatgacccaaacaccttccagtgggccccgcctccaactttgggaatcagatttcaatatagcgtgtcaaatatccaaaacatagcatataaattctgcagtgagcatatatatatattttttagatggtgtctcactgtgtcacccaggctggagtacagtggcaccatcttgagtcactgcaaccaccgccttctgggttcaagcagttcttctgcctcagcctcccaagtagctgggattacaggcacgcaccaccatgcctggctaatttttgtatttttagtagagacagggtttcaccacgttggtcaggctggtctcaaactcctgaccgacctcaggtgatccaccctcctcggcctcccaaagtgctgggattccagccatgagccaccatgcctggccagtgggagtgttttttgtgtgtgtttgcgatagggaatatgttgtgtcatctggcctctgggttttctcttatttagggacccccaacccacaggccatggactggtacgagtttgtggcctgttaggaactgggacgcactgcaggaagtgagtggcaggcaagtgagcatgaccgcctgagtgccacctcctgccagatcagcggcagcattagattctcataggagcgcgaaccctattgtgaactgtgcatgcattgcacgctccttatgaaaatttaataccttamgatctgaggtggagcagtctcatcctgaaaccattccccatccccccacacccttggaaaagttgtcttccatgaaactggcccctggtctcaaaaaggtgagggactgcttttgaagaggacactaagttttcyccttttgcatattttcccattcaccactcagtgtttaaaggctgcctccccatactttttaactttcttctctcccagaaacaatgccttgagtcatgcagatttaaagtcccgtctttggctaggtgcttacgcctgtaattctagcactttgggaggtcaaggtgggtggatcatttgaggtcgggagttcgagaccagcctggccaacatggtgaaactgagaggtgaagcctgctggacttactgggttgagtggggacttggagaacttttaaggggattgtaaaatgcaccaatcagcgccctgtagctagcatcaggattataacatgcaccaatcagagctttgtaaaatgcaccaatcagtgctctgtaaaacgcatcaatcagcaggatcctaaaagtagccaatcgcagggaggattgaaaaaagggcactctgattggacagaaatggaacatgggaggggacaaataagggaataaaagctggccaccccagccagcagcggcaacccgctcgggtccccttccatgctgtggaaggtttgttctttggctcttcacaataagtcttgctgctgctcactttttgggtcggtgccacctttaagagctataacactcaccatgaagatccgcggctccattcttgaagtcagcgagaccacgagcccacaggcgggaaccaactgcggacacaaaacctcatctctactgaaaatacaaaaattagccaggcatggtggcaggtgcctgtaatcccagctactcgggaggctgaaggggagaatcacttgaacgccggaggcggaggttgtagtgagtcgagattgcgccattgcactcctgcctgggcgagagagtaagattctgtctcaaaaaataaataaataaataaagttgtttgttacagaacctgatcttatctaccagagctcgttttccatattttcacacttaagctgagtttccccttctgatggttcttttagctcagtcctactcttagcagcagcttcccactttctggttccacagttttcctagattttccttgcgctctgtatgaaggtttgcaataggagtgggagagagaaagctcactggtagtttgtggttttctactttgttgtaatttgttcttttaactgtatttattattatgttgtaaaacgtgttcagagatatgtggaacccagaattttcactgattatcataagtttgcttttctttcttttttcttttcttttctttttctttttctttttttttgagacgtggtttcgctcttgttgcccaggctggagtgcagtggcacaatcttggctcactgcaacctctgtgtcctgggttcaagtgattctcctgcctcagactcctgagtagctggaattacaggcgcccaccaccayatccggctacttttttggagttttagtagagatggggtttcgccatgctggccaggctggtctcaaactcctgacctcaagtgatcctcctgccttggcctcccaaaattctgggatttgcttccattcattaattttgttgatttgcaatgatttacaagatttgtagttcaaagggaccattgttagtgtcacaagtacagtgcctttgtctgtttgtgttgctgtcaaggaatacctcaggttggatactttataaagaaaagaggtctaactggctcacagttctacacgctgtacgagaagcatgacaccagcatttgctcaggttctgtcgaatgcttgaggctgtgccmcctctcagaggagggtgaagaggagccagcgtgcagagatctcatggtgagagtggaagggagagaggggtggcaggtgccgggtgccaggctcttttcaacaattagctcccagggaactctcctgagaactcacagagtagagaacccactaccatgaggatagctccaaggcatccatgaggggtcggccccatgacccaaacaccttccagtagacccccgactccaactttgggaatcagatttcaatatggcgtgtcaaatatccaaaacatagcatataactactgcagtgggtataattttttttttttttagacagatcttgctgtcacccaggctggagtgcggtggcaccgtctcggctcactgcaacctccaccttctgggttcaagcagttcttctgcctcagcctcttaagttgctgggattacaggtacctgccaccatacccggctaatttttgtgcttttagtagagatggggtttcaccatgttggccaggctggcctcaaactcctgacctcaggtgatccacctgcctgaaatgaacgaataaataaaaattcatgataatccaatccagggttgatttccgcttatattgctgaaaccatgtaaggtttcaaccagatragatgtggtctccacgatctccccacttggttttaagtggggagatactagattgaaggcttatgtggatgggaatacttacctacatcagtgtagacagctacattaaaatcccttgaggctcttattgaagtacagattcccaggttccaagtttcaaagaactgaagtattaggttgcactgtatgaaattgctatttgtggccaaatatcaacaatctcacatgatccaaccaaatatgatgaaaatcccacagtactgaagtaaacctactgaatacaatttgatatcttagctgttttataaggacttctagtgaactcatttgttcaaaaattcattcatccgatcgaccagatataaattatgactactaactcggataagatgtgatctctaccatcataactactaaataaaaggaaaacatgtgatttccagttcagatgagtcactgaagcaagaaacccagaaggaagaaccaacttgtgatgaaaaagtcattttccaagttcctgggactatggataccgaacttcrgttatcactttaattactgcagatatacaagccacgacaaactggcctgatctatatataattacagacacaagaaatgctttggttttactaaatytcagatatcacattgccattgttcctctctcctaataagagtgtgtaaattacagatacagatgtttttaaaactttctgatagccagcgggtgcagtggctcatgcctgtaatcccagtactttgggaggccaagatgggcagatcacttgaggccaggagttcaagaccagcctggccaacgtggcaaaaccccgtctctactaaaaaaaamccacaaaaattagctgggtatggtggcgggtccctgtaatcccagctacttgggaggcagaggcacgagaattgcttgaacccgggaggcggaggttgcagtgagccaaggtcgtggcactacactccagtgtgggtgacagaacaagacgccttgctccttaaaagacgtccttaaaaataataataaytttctcgtagctgtatttcacatcaagaaacaaataatcctgataaaacttatttgactagctacttattggtatcaacaagctcttattgaataaatatgtaactgaatgacatcctggrggctcattattattatatgagttacccaaagttcccagaatttctggtatgcagtgctgtagccaacagtggtcattcctatatctgcttttacagtttttactrtctataccagttactctcaaaacttcatgggcataagaaacacctgggggggtgtcaattgaaatacaaaataaataaaaaataaaaaaccactatcaacaacatttgagtcttgcattttacctgtgatatgggtgcctacagactttatcagtgtgcttctcatgggaagttttagcacttgaaacccagggacaccatttctattatctgagaccgccttgaaggtttcttcccctttcgatattcctctctgttctttctcactaattcttggaaagtcatcttcaattcagttcaacaaatacctattgtatatttactatatagtagacacagagctcagagcttaaggaatgtgaaaatgcacaagacctgccccctggctacgaggagttttttcatctagtaggagaagcatatgtgtctggctataatacttggcagaataaaatagctgtgatgttgagtttcgttgagttttatttctattgcatagattgaatgtcttcagcttcaggttgcaaatcctggtgactccagcacaatatgtgttataaatagcattgcatcttgactgcaaatgaactcagagagagagagagagagagacagagagagagagagagtgggcaggcaggaagataaaaggttgagcacaatttgggcrtttgtttatgtgattgaactacggctggggctgggctaggtgctgttcatggctggaggaggcaggttcttttcctgtatgagatttttactttttatttttattttttgagatggagtctccctcagttgcccaggctggggtacagtggtgcagtctcagctcactgcaacctctgcctcttgggttcaagagattctcctgcctcagcctcccgagtggctaggattacaggcgcctgccaccacgcctggctaattttttgtatttttagtagaaacggggtttctccatgttggccaggctggtctcgaacccctgacctcaagtgatccacttgcctcggcctcccaaaatgttgggattataggcgtgagccaycgcgcccggctttgtatgagattttgtctttgtgactaaatcacttctttgtgtacaaacttacattctgcccctgagcatgtgtgttcatgcttaactgattcaaagactacatttcccccaacatattacaccaaatgtacttaacagcaattagaatgtttgccgcctgctgtgtgcagatctccccagaaaacaaaattctcctaaatggcagtataagtaattctgaagattaaagctggtgatttgcagagtgcttggttcgctggcttcctgcaaatatcaagattaacaaagaaattcattgatcccattttgcctccttaatgcctgtgcacaggcctaagggaacgcatcccacgtggctgtgtgattcagatgaagacttgctgttgctttttttcatggccaagatgctgatttagtggcatttttcttggcaaaagtgccccaagaaaacaaatccatttgtgtatatttttacgggaaaygctccacctaaccctgccccgctgaaagccttccccgtgagtcgtgaaggaaacatggctgatttgctactgttcaaagggcgactcaggtcttgactgaaagacygtacaygggttgtttgatgctstrtaaatmtcagccacgctgaacactcctttccccaactctaaatacaggacccctgaacatgttgccctccacaccttcttccatttctttctttctttctttctttttttttttgaggcagagtctcacattgtcacccaggctggagtgccgtggcccgatctcagctgaccgcaacctccaycttctgggttcaagtgattctcctgcctcagcctcctgagtagctgggattgcaggcacgcrccacsatgcctggctaatttttgtatttttagtagagccagggtttcaccatgttggccaggctggtcttgaactcctgacctcaagtgatccacccacctcggcctcccaaagtgctgggattacagtcgtgagccactgcacctggccactttgttccatttctaatgtgttaatgtactcaataagcaatagttttggagtgtagatggtgtaccctgaaatgcaccaggcactggaaaatacagtggtgattgagaggcaaagtccttaccctcagagcagagcaatcttttgcaaacacacgttgtgtcctggtcactctagtgagaccagcagccaatgccagccgccagtttggcggctttctctggacagctccatcacccccattccctttgattgagacctttctgtgtccatgatgatctccccaacttggaattctgctccattctctgatttcttcattctccgacttcaaaaccagccttctttagtattcccttccagcagttaagtaactttcgtatagctgatattaaaaagaaaaccctagacaaattaaatgaaacagagtttaattgagcaaagaaggattcgcagatcggacakycgcgtggtggataaagatttaaggacagcaaaaggagagtggtggacggaaaacagaagcaaggtagagaagcagcttcttgattacagctcagtgtttgccttacttgagcacagtttgaacagttggccacctttgattggccgaaactcagtgattggcacaagaataggtgacagtttgtttccatatccagtaaggttacagtccactatttatggagaaaccttgaggtttaacttaaagtatgcaaggaggcagctttaggctaaacttacatatatacatgtttttttccataagttattggggtacaggtggtatttggttacatgagtaggttctttagtgatgatttgggtgcacccatcacccgagcagtatatacagcaccctatttgtagccttttatccctcacctcccctcccacttttaccaccaagtccccaaagtccattgtatcattcttattaggctaaacttaatttaacagtagttagtggcaggccagagatttgaagtcaggcctcagtacagatttggtgwtctgccttcctcagttcttggcatgtaggatcttggtgctcccacacagttttatcttttccttctctgagtgtcctggatggagtgtctcgcttcagtcctggttttcacaggactcagtgccctccaccaatatcctgctgggcctaattctgcctctcttctgtgaggtcgttgtatggggtgggattcccaaggcaacataccattttgccaggtaaatggcattcctggcaatattcctttggaccagtgaggaaagtagaacattttatggggtagtgcagatgtgtgactaaatatttttcattakaacccgttttcaatgactcattaaagcaatttttaaacccaggcatggagtcagggagcaaaactgtcttagggagaaaagagggaggtatgtcaggacactcattttgaagaaggcatgactttgcctactagagcttagcatgctttctgcttacaatcccacctgctggctgagtggagagcaaaattctttaaagatgtrggaatgtaagatgagaggaactcatttgctggggctgaatgccaagtgaaaattccgcttctttaatctacttcccttctcctatctttcccctgcattcccagatttctaaaaggaatcattttaatacttttttttattatttttatwttgagatggagtctcactctgtcccccaggctggagtgcagtggcatggtcttggctcactgcaacctctgcctcctgggttcaagcggttctcctgcctcagcctcccaagtagctgtgattacaggccygtgcaacaccatgcctggctaacttttgtattttcagtagatactgggcttcaccatgttggccaggctggtctcacactcctgacctaaagtgatctgcctgcctcagcctcccaaagcacggggattacaggcataagccaccacatccggtcatggaaggaatagtttttgtttttttgaaacagagtctcgctctgctgccagggtggagtgcagtggtgcgatctcagctcactgcaacctctgcctcccaggctcaagcaattctcctgtttcagcctcctgaatacctgtactacaggcgtgcgccaccactcccagctaattttttgtagttttagtagagatggggttttaccatgttggccaggatgatctcaatctcttgacctgtggtgatccacccgcctcggcttcccaaagtgctgggattataggcgtgagccacagcgcccacccaggaggaatagttttaatctgttgcatccatcactccctccacagctcagcatagtaagcactgtattgaaatgtgcagatgtctcctatgatttcctgccaaatttaatagttttaatagagttttaaattcttttttttttaatttaaagaaagtatccaaatgacagttgaatatgttatttatgaattgtctagatcagcagttcccagcctttttggtaccagggactggtttcatggaagacaatttttctatgaactgggggtgaggggtgggttggtttggggatgattcaagctcattccattgattgtgcacttgtttctattattattacattgtaatatataataaaataattacacaactcattacaatgtagaatcatggggagccctgagcttgttttcctgcaactagacggtcccatctgggggtgatgggagacagtgacagatcatcaggcattagattctcataaggagctcgcaacctagatccctcgtatgctcagttcacgatagggcttgcactcttacgagaatctaatgctgctgctgagctgacaggaggcagatctcaggtggtcacgtgagtagatggggagaggctgtaaatacagaagaagttttgcccactctcctgacgctcacctcctgctgtgtgacctggattctaacaggtcacagactggtattgttccgaggcctaggggttggggacctgtgatctaggtgtatacatagaaaaagaaaccctcggctgggcacggtggctcacacctgtaccagcactttgggaggccgaggcgagtggatcacgaagtcaagagatcgagaccatcctggccaacatagtgaaaccctgtctctattaaaaatacaaaaattagctaggcatggtggcgggcgcctgtaatcccagttactcgggaggctgaaacaggagaattgcttgaacctgggaagcggaggttgcagtgagctgagatcgtgccattgcactccagcctggcgacagagcgagactctgtctcaaacaaacaaacaaacaagaaatcctcttcaagccccagccccagatctctctcttctcagcaaaggtgactactgttggctgtttcttgtgtgtccttctgctgttttcttatgcatgaatatgttagacatgtccatttttaatcttgaaagattctgccgacttgctctctaaaggactctgcctgtttatatgtcacccaacagtacatgagtggccttcctcacacctgactccctaggtaagaccagtcttcatttgttttgccaacctgaaggctaaaaaaatatttctttatagttcttggatgcctttctttgactattacagaggttgatcatctcttcatgtatttattgaatatgtgggttccttctgttgatttctgagagacatttgttcatatcactcactcggaccgagactttttgtcttttagttcatggattttcaatacattttgttctacctattggtgaactatgttgttaggtatgtatattcatgactatttaattgtctcaagcaatacctttgatcaataaaaaacattcctctttgaccctggattccttcatgtctcttgtaaaaccactgccgtaatcttatcsatctacttctcttgcctctcctcatcaatacttcttccttataggcttctgagtatctttgtaaaacatcagtaggttctagctgggtgttagcctgaggataaactgatgaagggtatgggaccaaaaaacatataggtggaaaccccaaatcccaagcgctggccatgggtttaccttgacatgtgtgcaggggaggtgggaaggggacagtctggaccactggcatttggaccacacatcataatgacagcygagaagggaacctatttggtatagaccgagcttcccttctgtttgacatgtttgttggtggtttccagacaagtgtccctaatctatgtggttgtttgcctttaacagatggttccaggttayagtggggcccccaatgcctgaggccaccgggaaattgagaaatcagatctagtgagttrccaatttctttgactggtctcactagccactgacgagtccaccagctcctttcaaatttaatttcaggggtcaaatgcccccttctatttggggctcttcctatcagaccaaatgccttgtttgtagttctgatgatttaggctggaaaacaccgttttctgccaacgatgcagtcagctgcatagaacaagctgccattgttaattaggtaagttatgtggtcraggaagtaccttttactggtggtctttattcagaataaggaagaggggacttgtgatggagccacacagagaactagcaggtcaccagccagagcactggaccctaggagaggacttgggctctctgagccagttytgactgcccacggaagatgtctccacacattccccattgcttggggccaaaaggcagtggcagaatctctggggccgtgggaggagccgaagaacagacgtggggagggggaggattgtgatctggggaagagagcgtgcacacacgcatcttkgttggacctgaagggatgctatgttgttctttgattaacacacatgctctgtgtawtgtcacttctctggtctaaaacccttgacactgggacttcccatgactggaggatcaagtctgaattttataaggtggcttcagaacacctggtacactgctgtcttcttttcctcgcctcagtcccttcctgaaacatctatttcagtttcttggcggtacattgtacattttctctcctctgtttttacacatgctattcatttttttcctagagagtttttcccgtcttcctgtctccccctttgcaggccctcrcctggaaattacttactcatgcttcatgacycagttcaaattttgtcacctctgtgaaaccttccctgggccccgttgatctccttgaaggcagaaataagctcccagagcaggatgaacaaacgtctcttgtcgcatttatccttccgtgtcataattatgatttacatatatatttttttcttaaggagctgtgagcttttccagaataacagtgagattttagaaatttctgtatcctcaacactttgcttgcccataattgatgctcagtgtttgcaaatgtcacagttaagctaatgtttctgggtgatatagacatacttgttcttcggtgtgttaagaaggaagaaacagatttttaaactgatacaagatccatattaaaatcaaaggctaggcatggccctccatcagtgataagcattgaggcgtatctatactgcccagtttcctcgggggtgggggggggtgttcctctctcctagcttttaccactgagatgaaataagaatcggaattaaataaagtcaccatcctcagcaagagatgagtttcttctccagtgatctgatgtggcattttcagccaggaatgagatatcctgggaggggaatcagtatttctacaattataggttcttcaataagtcctagaatactagaactctgtgctctgcacaacctactcttagtacacatgaccagaatgccttttctctgttacattgattaatrtattaaaccaatacttatcaagtatctgggatgagcctaacctatgtcagtagatatatcagccaaagattagtggtccctgacctcatggaacctgtaggctagggatgcaaagggtaagagtcaggaacaaaggctatggagagatttattgttgctaccctgagttcctgcctcatgtatccactaccatttctatagcttcctcaatagcccaaagtgtgaggagtaaagttaatatggcagtctccaagttcgtaggagatcttccctgtggggttttggaaaggaaggcactgctagttggaggaaggttgaaaagaatgaaaactatgtgccaggcgtggtggctcacgcctgtaatcccagcactttgggaggcagaggtaggcggatcacttgagttctagagttcgagaccagcctggccaayatggagaaaccccgtctctactaaaaatacaacagttagcccggtgtcatggcacgcgcctgtaatcccagctactcgggaggctgcgacacaagaatcacttgaacccagaggcggaggttgcagtgagctgagatcgcaccattgcgctccagcctgggtgacatagtgaggctttttgtcaaaaaaaaaaaaaaaaaaaaaaaaaagaacaaaaactatgtattattgacctgtgtcagagggatggtccagatggcagggagaattctacaggacgttcaaaagccagtggaaatgggatttaaagaggattgaaaacgttcttttgatgccattctgtcctagggtggaagtgaggtctagaggaagcaattggccatgtaagttattagattgctttacaagtgggtattagtgaatgagacccaatgccagggatgctcagttagagagttcggcttcttaataaaacacccagccccggctcccatcctgtatggcattgtcatcattgtaaacagcagttctataaccktaagaaattggcatacagctggagctaactctrtttccaaacaagattttagtcatygtatgtttaagtctctcatgcttcttcagagccacctgttcrccarcagaggaaagtctccaagtggagtgactgattttatgtttattttatttkagtttgttactttttgaggcgggggctgaagtgcagtggcagcatcatggctcactgcagccttgaactcctgggctcaagcgatcctcctgcctcagcctcctgtgtagctgagactacaggtgtgtgccacccaaggctggctaattttttaaaatttgtattatttatttttacttttttgagacagagtttccatctgtcacccaggctggagtacagttgtgtgatctcggctcactgcaacctctgcctctcaggtttaagtgattctcaagcctgagcctcctgaattgctgggattacatgccctaatttttgtatttttagtagagatgggttttcgccatgttggccaggctggtcttgaactcctggtctcaattgatctgcccacctcagcctcccaaagtgctgggattacaggtgtgagccaccaccgygcctggcccttatttttattttttgtagagatggggtctctctttgttgcccaggctggtctcgaacttctggcctcaagtgatcctcctgcctcagcctcccaaagtgctgagattacaggcatgaaccactgtgcctcgtctgactttatgtttcttatacaagcatatsgtgggattgctcctgggtagagacagaagttggaggtcccctttagtggtatctgtatttgttttcaagaatgaataatgtgaggtcaagttgtatctttcttcccccacatctgcctgtcaaaggaatagttgtgatttcatttttgattcagaactgttgctgactgtggcatcagtgggcaattgtagggtaacacagtgtgtctcttatttaatgcctcttcatgtcatgcccatgtgaaaatctcaggcttttagtcaagctttgcagttccctttgattttgcaatatgattttgtcagccatgaattgatctaaatcgatgtgtttttctgttacatttgcttatgataaaaaaagaacagaaaaagtataaagaagcaacaaaaatgatttataatttcaccacccagaggcaaaatgacatttcattgttttttactttgaatgtcttttattactcatgaagttctacctgtttttataagtttgttagccatttgtctcttttgttatatgaattatgcattcatgttttttgtttatttatctaattgtgctctttgagttttcattatttgaatagtgtaagatctttcactcttttgttattgctgtaaatgacttttttgcaatttgccgttgtcttttaatgttattttgatgatcagaggttttcggctattattaaactattacttttaaacttggaaattctttcatatccagaatttgtatgaatattcacttatatcttgttttattttccctatatttataattctaaatttaatggttttatctatctgcagttggttttgaattgtgtttggaagggagacrtgcactattataccccatggagataggaaaggacccccaacaccatttattgaatgattctctccttgcttttggtttgtggtaccttctaggtatttattctctaagagcaggtctgcttgtggcctcttggttctgttgcacttgccagttggcttgttctggagccatcctgattaaattatattagccttagaattagagttattatgttgtgtgtgacagggtctcactctgtcacccaggctggagtgcagtggtgccatcatagctcactgccatcttgaacttgtaggctcaagtgatcttcccgcggcagcttcctgattagctaagactacaggcacgcaccaccatgcccacctaattatattcttttctatttttttattttttgagatggagtctcgctctgttgcccaggcccaggcccgagtgcagtggcacaatcttggctcactgcaacctccacctcccggcctcaagcgattctcctgcctcagcctcctgagtagctgggattataggcacccaccaccaagcctggctaatttttgtatttttagtagaaacagggttttkccatgttggacaggctggtctcgaactcctgacctcaagtgatccacctgcctcagtctcccaaagtgctgggatcataggcatgagccaccatgcccagcrtgttttacttcatttttaagatagaatcttgctctgttacccagtggtaacatcacagctctctgcaacctcttcctcccgggctcaagtggtcctcccgcctcagcctccctagtagctgggactacaggcatgtgccaccacacctggctaatgttttaaaaaaattttgtagagatggagtttcaccattttgcccaagctgatctcaaccctctggtctcaagtgatcctcttgcctctgcttctccaagtgctgaaattatagatgtgagccactssccccggccataattatattagctttatattggattgaatatcatatacagatgtgtagcatacaatgatgctttggtcatctgtggcctacacacgatggkgaaaagctgaaaaatagttcccaggtagcatacaagaaagggatccccatgctagctcccagaagggcttagctcttgttattttaaggaaactgaggcccaaaaaggagtgatccgcatgttgaggtggggagcttttagtatcaacacagtttgataacatgcttctttatgcattgcgtgtctcattagcatgtgaaacctctactcctgggcatgattttcagtattataatgagattatattgaggaaaaactcagtgaaaggtcagcgcttggagcccatcttgtcttgagctggctggattcrgtcaggctcttttcaggaatgccagcgtctcacttcactagccttggaagatggccacgttcttaccaggaatggtggagtccctctgtaacaatctggggagaagtaattcaaggagagaaacaggttctttcttttatggttgggaattctgyttggttagctaagttaggagggcctgctttctgcggtgtgactcaggtcagctggtgaagggaggcagggaggttggggaggggaagatgtgaagggtcttggtgaccatgcctcttgtctgccaggaccgagtctctataccgggggtccccagaccttgggcagtggagtggtttcggtctgcagcctgtggcctgataggaactgggccgaacagcaggaggtgagcggcgggtgagcaagcgaagcttcacctgtatttacagctgctccccatccctcacttgagctctggctcctgtcagatcagcggcagcattgaatgctcataggagtattgtgaattctgcatacgagggatctatttcataggctgcacactccttatgagaatctaatgcctgatgatctgagatggaacagtttcattcttaaaccatcacccccacgccacacccccggttcatggaaaaattgccttccatgaaaccggtccctgctgccaaaaatgttgggggccgttgctctatactgtctcccaatgataaaatctaaccacacgtttctccaaacatatcatattgttaaacaccatatgactgtgcatctctgggtttccttataccctttccttttccacagttttgttatttattgttacctattctttcaggtgcaatgttgaaatcatttctcaagtgctaaaattgtttccatagaaatatttacaaaggtaacatttatagtattttttaaattataaaggtaatgcgtttttggtgtggaaaactggagaccacagtgaaatataaaggagtaaacagaagcaataaaaaattcctccactcacaccttccttgatgaataattccttcttttcagaagcaggagctttggagtcaggtagataaagtttaagtctacccaccactttcttggctttgtgaaagtgactctgagcctcaattttctcatctgcaaaatgaggaatcctacatgactggcttattgtgaaacagaatgagataatgtataggctgtacggttccagcatagcagccagaacggctgggctcacccttgcacatgtccagctgggggccgcctttctgctccttgtgtttcaggaccagtgggctagcccagtcttctcattatgaaggcaagagagcccctcgtgaggctcacgcttggagctggtacgtagctcttcacctggtcaaagcaagctatgtggccaagcccagatccgaggggtagagaaaacagactttgcctcttgagtgggaaaaacttcagtcacactgcaaaggatgtggagacgtggaaggtgaaggattgggctatgaatgcattttcccacatagtagaaacaggatctgctcaatctctctggcagttcaggatgggagaaggcattttagatggactgagataagaccaggttaggactaagctggacctggaggggctggggtataggatctgactgaaaggtgcatttggcttgttcttgaggaggattttttttttttttttttttgagacggagtcttgctctgttgcccaggctggagtgcagtggcrcaatcttggctcaccgcaaactccacctcctgggttaaagcgattctcatgcctcagcctcctgagtagctgggattacaggcgcacaccaccatgcccagctaatttttgtgtttttagtagagacggggtttcaccatgttggccaggctggtcttgaactcctgacctcagatgatccacccacctcggcctcccaaagtgctgggattacaggcgtgagcctctgtgcctggctggaagattttataagtggagataacaataatgaaagtaacacaaggacatagggatggcccagatgtgggaagaaacagaagtgtttcagggtcaatgtcagtaaaaacacaagcttgcagggccaatttgggcagaacagtaaaaggaaaatcggctcatttggtaatacrtttctcatttctctgctgacgttgcagggtaacaacttttaggaccagtttggagctctgtaaagggccaaagaggttggagggtgagacattgagtgagagcaaagggttttatggccttcagagatggtctcgctctgttgcccaggctggagtgcagtggtgcagtcacacctcactgcagcctcgaccttcaggactcaggcgatcctctcacctcagccttccaggtgagtagctaagactacaggcacgtgtcaccatgcctatctaatttataaattatttttagagacacggatctccctctgctgcccaggctggtctcaaactcttggggtcaagtgatcctcctccctgggccttccaaagctctgggattacaggcatgagccactgcccccagcctttgssttttagtttctataaagaaacctactgggccagacgtggtggctcatgcctgtaatcccagccaaaaatctgtggggctcagctttccttggccagatatgccagtttcaacgtacagtaggagggcagaacacttgaggtcaggagttcacgaccagcctgaacaacatggtaaaaccccgactgtactgaaacttcaaaaattagccggtgcggtggcgtgcgcctgtcatcccagctacttgacgggggctgaggtaggataatcagttgaacctgggaggcagaggtcacagtgagccaagattgtgccactgcactccagcctgggccatagcgtgagactccatctccaaaaaaaagaaaaagaaaaagaaaaagaaaaaaaagaatcttactggccaaattttggatctgctgctgcttggcgtaaagctatttattatttctaatttgcattatttcctgatgtattttcatccctcttgcagcagtcagggttgtcccctcgtttgacatgtaccatagaaaggttataggattgaatactatgtaagaataacgtaggcagcatttcctgtgcatgcacaggaggattttttttttttagctctggcctgaaactgtctgcattaatttacccttaattgtttttagaaattctattcctgagccattgcttaataaaacttaaggtttggagttggtttttttttttttttttttttttttttgctttagttgaattcatcaagataagctgtattatactcagattcatttactgaactgagaatctgaaggaygcctcccttctgctcccgtatgtgtgcgagtgtgtgtgtatgtgtgtgtgtgtctgtctgtgtgtcttttcttcccttttagagaaagcagtgctgtacaaagcagggaactatggtagaattgagggtaaaagaagaaaatccttctaggcacagtggcccacgcatgtaatcctggcactttgggaggcccaggcaagaggattgattgagactaggagttcaagaccagcctgcgcaacttagcaatgccccatctctgaaaaagaaaattaaaattagttggtcatggtgtcgtgcctgtaatcccagcactttgggaggccaagacaggtggatcagttgaggtcaggagttcaagaccagcctggccaacatggtgaaaccccgtctctactaaaaatacaaaagttagccaagcgaggtggtacacacctgtaatctcagccattctggaggctgggacaggagaatcacttgaggccagaaggtggaggtggcagtgagccaagattgtgccactgcactccagcccgggcaacagagcgatattccatctcaaaaaaaaaaaaaaawaaaaawaaaaaaaawatatatatatatatatatatatataaaatctccttctgatgataaagggttagtttgtttgcccatgacaggccctcctactgtaccttgaaactggcatatcaggccaaggaaagctgagccccacaaatttttggctaaaggcaattacctcatccctggaaaagcaactctttatgactcaaagaaaaatacatatttcccaggtagccgtggagccagtakatcagtccaagaataaaaaaatgtctttggagaatattccaaaataaatattaataggagccaggctgtcaaagaagacatagagctttgttgagcctaaagtgcttggcaacagaacctgggctagtcactggcctgtgaccatggtgttgggggagactcacactgacagtgatgttctctgggtgtgtagactgagttcatctcttcctgccctgcttctgagggaagctgttaaaaggtatgaattctctccccagcaaaaacaaaacaaaacaaaaattccttgtccatgcacccacaatgatatggtttggctctgtgttcccacccaaatctcatctctaatcgtaatccccatgtgtcaagggagggacctgtagtctccacgtgttgagggatggaggtgattggatcatgggggcagtttcccccatgttgtccttgtgatatagtgtgtgagttctcagatctgatggttttataagtgtttggaagtccctccttccttctctctcctgccgccttgtgaagaaggtgcttgcttccctgttgctttctgctatgattgtaagtttcctgaggccttccaagccatgtggagctgtgagtccattaaacctctttcctttataaattacccagtctcgggaatagctgtgtgaaaacggactcatacaatatcttgcattcaatttctaggagttttgctggggctccatagaccacaaaayatctcatgctttaaagcaggctaaatcttgatgtgtgaacattgccccaatatgactaataggcaggacacacttggactcaaatgctagagtagacagtttgtacgggagactgctctgtgagggaactgagctaatgaggtgtgttgttgcttcctggaagaactgcagagctcaactggaggaaattaaaccactcagcaaagtgtgcatttttcctaataatgagagctccaaaagcggggcctcgcacctctcagtgattccaacccccatctcattttgcaaggttcgctgttgccaaaaatgataccactctttcccgagattatagggaagccttgatgaggagggaagcataaagggaaaattgggctggttaatgcacttgacccaagcagctttcagagtttgagccctgattagtaaatcaagggagacagaagtgtggttgtgttcgggatggtatcttttaagcgttgaggtgccatcactgatgctttaattgaggtaggaaataagtgatgcctttgatcataagagaagcagagggaataaataggaaagggattttcatttgttcattcagtaaccatttatctgccaagcattctgccaggctctaggggaacagaaagaaataaggccagtcactgtggctcgtgcctgtaatcccagtgctttggaaggtgtacgaggaagaattgcttgaggtcaggagttggagaccagcctgggcaacacactgagaccccatctctacaaaaaaaaaataaataaataaataaaaataaattagccaggtgtggtggtgcacgcctgtagtcccagctacttgggatgctgagacaggaggattgcttgcaccctggaggtcaaggctgcagtgagctatgattgtgccgctgcactccagcctgggcgacagagcaaaaccctatctctaaaaaagaaaaaaagaagatgctgtagctcctgaaygcctgcactcttggagtggggatgaccagagtgaagagtgccatgatggcagcccacagagggacagaaagtaacaaaggagaagtgcctgataccaggctggactctgggaaggctagggctggagaccagaggaagtgcctagcaggaggaaggtagtgttgggcagatagaacagtttgtgtgacttgagagacagcattctcagttctaggaaataacaaattcatagtggctggagaaagggcagggagaggcgatgaggttggagagatggatcgggctcaacttgggtgccaagcagaggaatttaaacctaattctgaaagcttagaattaggagaggccaggagatcctttaagtagaggagtgacgtgatcatatgtactctagagaggtcattctggtcgcagtagggtaagtgggatggggttggaggcaagggaccagttaggtggcttttggtgtcattcaggaggtaaccagtgaggactggaactaaggcggtagcaatggaggagaagggacaaatgtcacacagagatcctgaaaatggcagaatctgcaggatttggtgaccgataggcatgttgaggggtcatgacttgaatttgactcctgaagagacagggtggtggccttcagcaaagacagggtggtacaaaaagaggaggtttcagttttcagcatgctgaatttgggatgtttatgagcgctccacgtggagatttacaagggggagctgaagtttcagtgaaggtccaggctagagatgtgggtttgggagttgccagggtacttggagctgtagacttgcatgaggtcacccaggacccgtttatgaagagagaacagtgaagggcaaaagaaggagcttaaggatttggggaatttaaaggaaagggtaacctgtgcaacaaaaccagtggccaaggaagatcccagaggagaaaaagcccagataggaatgggggaggaatattgagtgtccaggatccgagaggaaatagcgattatacaaggagagggatggcggtgttgcatactgcagaaaggatcatcagcgatggtgaggttgggaaggtccctccattctggccacgtagagtagatgtcactggaaactttaacaagagcagtttcagcaaaataggttgcacaggagccaagtgctgggtgaagcgaggaatgaatgagaggtaaagaagggagacagggagggaaaggaacatgtcaatyaagccaattaaggctgtggaaaaagagactatttacttattttttattagtattaatattattattattatttttgaaacagaatcttgttctgttgaccaggctggagtgcagtggtgccatcatggcccccagcagccttgaactcctgggctcaagccatcctcctgtctcagcctcctcagtagccaacaccacacccggctaattttttaaatgtttttgtagcgatgggatcttgctttgtcgcccaggctggtctcgaactcctggcctcaacaatcctcctgcttcagcctcccaaaactctgggattataggcatgagccaccgcaccaacccagtttttttacttaaatgggagggagttgagtagaaaaggttggcagagggagagcgaagatgcaagagagagagtgatggacgaggcaaggctctgaggtgggaggaggctgggatccacagtaaggatgcaggggtcagccttgaactcctggactcagcttccatcaagagaggaggtgaagacaaagaatgggttgagaggtaggtaagcttgcaggagggaagtgcttctcccatttccagtgtgcaggaaccacccagagagcttgataaggggtagattgctgggccccacctccagggattctgagtccctaggtctgggaggagcctggggtttttgttttttttttttaagacaggatctcgctccgtcacccaggctggagtgcagaggcgcgatattgactcactgcaatctctgcctcccaggctcaaggtatcctcccacctcagcctcctgagtagctgggactacaggtgtgtgccaccacgcccagctgatttttatatttcttggtagaggtgggatttcaccatgttggccagactggtcttgaactcctgacctccggtggtccgctgcctctacctcccaaagtgctgggattccaggcgtgagccaccacgcctggcttggtcctagggatttttatttctaacaagcccccagaygatgctgttgcggatgctacagacctgtggaccacatgtggaaattagggctgatggtattgatttctctgtggagtaggaggcactatcccttgcggactgggaggttggcccaaggaacttggcaaaaggtagaggacagtgaagggtaatgaaatccagggttctgacctagaacagaaagaagcctgcagagcaggccaggtgcgggggctcaggcctggaatcccagcactttgagaggccgaggcgggcggatcacctgaggtcaggagttcgagaccagcctggctaacatggtggaaccccatctttactaaaaatgcaaaaattagctgggtgtggtggtgcatgcctgtaatcccagctaatcaggaggctgaggcaggagaattgtttgaacctgggaggtggaggttgcagtgagctgagatcatgccatggcactccagcctgggctacagagcaagactccgtctcagaaaaaagaaaagaaaagaaacctgcggcgcaaagagtggagcccctggaggtgtctcctttgcagctgcatgaatgtgagacttggtcttgcagcctgcagtgtcagctgtgtaagaaaaggggagaagaggcaagtgggtggttctgtctagagctggggtccttcagcacttgtgggaaagaaaggcagagggacaggagaactgtggggttggcaaaaggcagagcctggttgaaggaagtatggagagtccagttggactggacgaacttgaaaccagggaagggctaatagattaaaaaaacaaaacaaaatggctaggcgtggtggctcacgcctgtaatcctagcactttgggaggccgaggtgggcagatcgcctgaggtcaggagttcaagaccagcctggacaacatggtgaaacctcgtctctaataaaaatagaaaaattagccgggtgtggtggcaggtgtctgtaatcccagctacttgggaggctgaggcagaagaatcgcttgaacccagggggcggagggtacagtgagtcgagatcacgccattgcaccctagcctgggccacaaaagcaagactccatctcaaaaacacaaaaacaaaaacagaacaaaacaaacaagtgtcccagggcctgaaagtctaagagtaagggttttgggactacgaggctggagaactgggatgaagagagattatgactgttgaagtcaaaggtggtccaactgcagctgttctgggtgtcagtgaggtccaggaaaagccatgggggtctgagataattgcactgcagtaaccgaaacgaggtggtcctcctgggcatccctgggtgtggggtcagaggctcttgaagtggtgacaggaaggagaggttgcagtgacaaggttctgatgaggtgtgacaccgcaatctggtgtaatcttcttttccaaaccaaagggcagtgcgttcattcgggttccctagagaaagagaaggaattgggcaggggcaggatggggaggtagagagagagaatgaatttatttatttttcccattttttattgtgttaaaatatacataacataaaatttaccatcctaaccatttttaagtggttcattggcattaagcacgtttacattgtcatgtaactgccaccaccgtccatctccaggatattttcctcatctgaaacagaaacactgcacccaatcacaataatttcccattcccccttccctgtcccctgataacctcttttctattttctgtcaatgaattggaccattctaggtaactcctgtaagtagaatcatacagaatttatgttttgtgattagcttatttcacctagtaatcctcaaagttcatccatgtggtagtatattgcagaatttccttcctttttaaaactggataacattccattttatatatacacagccatcccttggtatctgaaggggattggctccagatcccccttggataccaaaatccctggaagctcaaggaaatccctcacataaaatgacataatatttgtacataaactacgcacatcctcacatatactttaaatcatctctagattacttacaatatctaatgcagtataaatgtcatgtaaataattgttacgcttattgattttatatcattattattattgttattgagactgagtcttgctctgtcgcccagactagagtgcagtggtgcggtcatagctcactgtaaccctgaagtcctggcctcaagcaatcctcccacctcaggctcctgagtggctgaaactgcaggcatgtgccaccatgcctggctaatttttactttcagagatggggtctcactgtgttccccaagctggtcttgaactcctggcctctagcactcttcccaccttggcgtcccaagtagttaaggctacaggtgtgagttgctatgcttggctctgtgttttttttatcttgattttggggattttttccctctgtggttggttgaatatgaaaatacagaacctgtggattagaaaggctgactccacatactacattttcttgattcatttgtctattgatgaacacctggattgcttccaacatttagctgcgaataatgctctatgaacatgcgggtacaagtatctcttcaagactctgctttcagttcttctgggtatatacccggaagtggaattgctactctactgttaacggaccacccaccatactattttccacagcggccgtaacatcctccccttccatcaacagtgcacaagggtttcaatttctccgcatcctcttcaacacttgttattttcaggtttttgttttgttttgttttgtttttttgttttttgttttaacagtagccatcttaatggatgtgacgtggtatctcagtgtagtgttgatttgcatttctctaatgattagtgatgttgagcagagagaggtttattttaagaacctggctcacatggttgtggtaactggcacatcccacgtccgcatggtaggtggagaccttgggaagggtgtctggtggcagaatttcctctggcagtggaaagagacgatgtgaagatgggtatgtccacagcgtgctgcagttctcaagggttttctcattgtcttgcagctactctgaggatgtcaaggtggtgttctctgactcaaactaccttttccatcagaatcccacagtttccgtcccatgttgccttccagagctctgagagtttgagggtagtatgtggtggagaggcctgagtgcccagagaacacggaccttcatcagcggtaaagactttattaattaatgctcatgatcttctgcatgtttatggagcactttggaaatgaataggaattagcccggtaggaatttgcagagcctggtgtgaggctgtcattgcattgtgagtctagctctttactgtgtaatctctaaagcttacaagatttctcctggaaggtcaaggaagagtgcctctgtactcagtagagctctgatatcacatttctccctctgttcttgaccatgcaagtctaattcagtgagatctatccattcagatccagcctggagctcaccgtccccaccttcctggtccagcttagcccatctattacagctgttgtagatacttcgtttgacacttagcatctcctgcattgcattgacaactgccttgttagaagtgtttaatgtgctttagccctcatatcccagaactctgggtgattggggtggggcagtgcatggtgattggtcctgtcccttgggtgtggcagatgttagggcagagactgaggggcatcactgcacttgggagctagagttgaggcaagcagccaggaaggcctgcagatcrgccacacagtttcgcccatgtgagccaagcsataccgagaaacccaggtagaccctcgaaaggggagcgctcgccttagacagacccaagagacaagggctggaggctgagctcaggcccagtggtcacctgcccagcccggcagtcatctgcccagccgtctgagcatgcacagtgcagcttccatatccagcccctttaagatcctcttctgtgcccctgccctgagggatgatggtgacgacagagtcaggccttggtgcacagtggctgaagtgctgcagtggctcattagcacaggacttttgcaaggcctagagtgactgagggcaaccttggctcctccctgcctgggattcttcagttccagggcttgggggcagaacactctcccacatgagctttatgcacattcccgccagcctgattaaccccaggggaggtggagccggcttctgctcacccacatcccccttgaagggaaatcaaacctgacccggctcagtgatactatgtgggaatactttgcccccagcaggccatgggcacggtgcacctggctgcagaggaccttctcctagttggggcttttagggcagagatgaagaaatcaagaaattggctgggtgcggtggctcatgtctgtaatcccagcagtttgggaggctgaggtgcgcagatcgcttgaggtcaggagttgaagaccagcttggccaacatggtgaaaccccatctctattaaaaatacaaaaattggccaggtgtggcagcacatgcctgtaatcccagcacttgggaaggccgaggcaggcagatcacctcaggccaggagttcgagaccagcctctgagggaccctctggagtgctcttgttttgtggaccaccacacagtcaatgagatgattcctgccaactgcctgtgagcccgtcaataatcactgtaatctccctggcagcccccagaagtagatttacagcagcatggtaaaaatgaggctgcttgatcaatgcatccctggacgatcttctccaggagacaaacacatattgtaacaaaactttattttcttctgaaaattgcctacatgattaatatggcctgacatagcccaagctgctcagcataagaaacagcygtatttcttgctccctcttcagctctgcttctctctcactccatggcttcatctgttttctttgttctgctccctgttccgttgtgctatatattgtgcaatctcccataaggagaagaaggatgcattaaagtgcaggtacctcggcactccattccactgtgtttctctttgctatttccaatgtggcttaggcgtaagcatgaaatgaaattcctcagtgctccctggacggactctcggtgcacctgtgactgagagaagcagagcacgttccccgggtactaaatcatctcttacatcacctggagccgtggagaaggccaaagctctatgctctggagtccatactggatgagaggaattcttccctttaatcactgcgctcgggcatatgagggctgctgggtattctgagggagggatgtcagcaggttgtcctgtctcctgtctccagggaggttctaggacttcccgaagaagagctggtgtgccttaggttgcacactcctccaggtgtagggtccttttccttgactatgattattggcgtgggtgttttatttcctctcctggaatgttagctctgtgatagcaggaacctctagtataacataatacagagcacttagtgggttcagtagatgccttcatttgggttcccccagaaacagagcctgaaacaaagggtttgagtgcaagtagtttattttggaggtgaagagagcatcactaggggagtggcgagtaagactgggagggaaagacatcccctctccaaagggtgtgttatgaagattgctcctgtgggtgatgggggcttaatcctgctgcggaaatttacatttaacctgctcttgggctgagggagctggggtatttgtattaggttggtgcaaaagtaattgagggttttgccattacttttaatggcaaaaaagtacttttaatggcattaaaagtaatggcaaaacccgcaattacttttgcaccaacctaatacatcagttcctggtgttctttttttggggggcggggagggggaacagggtctcattatgttacccaggctggagtacattggcatgatcatagctcatggtagccttgacctcccgggctcaagtgatcctcccaccccagcctcccaagtagctgtgaatacagccatgcaccactgcacctggctaattttaaaattgtttataggtacaggatcttgctatgttgcccaggctggtcttaaactcctggcctcaagcgacgctcccacgtcggcctcccaaattgctgaaattacaggtgtgaggcactgcaccgtgttccgggtggtccctagttgagagatttagggggtggagtaatcgcttaggcatcagcaaagaaggtttcaggcaaggaaatggaggggctggagtcagaagttgtgcggtgtgccctgaagctcagggcacaggtaggcagcacaggtagatgcgggtagatggcacaggtagatgcaggtagacatatgcctgggactgatgcctgggactcccctagtgatgctctcttcacctccaaaataaactacttgcactcaaacctttgtttcaggctctgtttctgggggaacccaaatgaaggcatctactgaacccactaagtgctccatattatattatagtagaggttcctgctatcacagagctaacattctaactcaccacctgtagggtggtgaatctgggrgaagtggggctgcatctgttaatgctgtcctccttagggtttattctcagttcttagccaaggagaagcctaagggaaccagtgattcacgccttgggacgactggatgaggattcggcygaaatcttacactatgtccagctgcagtgcctgagcttttatccttcctctgactctgcatttccgatctctccttccccaggtgtaaggagctcaagtactccaaggacctgccccagatatccatcatattcatcttcgtgaacgaggccctgtcggtgatcctgcggtccgtgcacagtgccgtcaatcacacgcccacacacctgctgaaggaaatcattctggtggatgacaacagcgacgaaggtacaggggtggctgacctgtgcacaggacatgatgacagcagggggaaatgccactttcattccaacgcgagcccgagcatctgtgtctcctggtccctggagcatatctggggaagggatattttttctttttctttttttgagatggagtcttgctgtgtcgcccaggctggagtgcagtggcatgatctcagctcactgcaacctccacctcccgggttcaagcgattctcctacctcagcctcccgagtagctgggattacaggcacccggcaccacgcctggctaatttttgtatttttagtagagatggggtttcaccatgttggccaggctagtctcgaactcctgaactcaggtgatccgctcacctcagcttcccaaagtgctgggattacaggagtgtgccaccgtgcccggcccaagatttttttagaggaagatatctaggcttaccctagtctattattccttgagtcctctagagcaggggtccccaaccccagggccatggaccaatagcagtctgcggcctgttaggaactgggctccacagcaggaggtgagtggcaggagagcaagcgaagcttcatttatttttacagctgctccccaatgctggaattactgcctgagctccacctcctgtcagatcagcagtagcattagcttctcataggagcatgaaccctgttgtgaactgcacaagcaagtgatctaggttgtacccctgcccyttttttttttgagatggagtctcgctccatcacccaggctggagtgcagtggtatgatcttggctcactgcaaccttcacatctcaggttcaagcgattttcctgccttagcctcccgagtagctgggactgcaggcacacaccaacatgcctggctaatttttgtatttttagtagagacagggttttgctgtgttggtcaggctgatctcgaactcctgacctcaggagatctgccctcctcaacctcccaaagtgctgggattacaggccatgagccaccgtgcctggctggttgcaacctttttatgagaatctaatgtctgatgatctaaggtggaatagtttcatcctgaaaccatctcccctgacccccatgttccatggaaaaattgtcttccacaaagccactccctgatgccaaaaaggttgaggaccgctgctctagggctcataagaatcattgactggccatggatctagatgaacttccttcttctcattagctaaagcagatgacagtgaagagctgaattcctcctccactccccaccccgcaccccatctttgttgtccttctccaaaaagcgaaataaaaaattccatcccgtgttaggaactgtttatctacattggaattctcctctgggccactgtgcccaaaatgatcttaagtagaagtgagtggtgtttgctcatcttctggaattcagcgctactaggaatgatggctcaatgaaaactgtacaacaggcaaatattgcatgtcaataacaaaactcctgggagatccttggagatatttaacagttggacaaaggcgtggcatccagggcaatgggggtgggtgctgctgatggtgcctttgtgttggatcccaacctgcaaaattcagtgtgctcactgctgggagccacccccacaagctcatgagataaaagaaagccagctagagtgagtgcctgaaggccaagaaagcttatcttctcagcaactacaggattaggagtaggctaaaccccttcctttcatcgtgctgggtaggagagggattaccctgcaagctgctccgtcgtccggaagatggtgaggaggaggcaatgccacgggtcctgtttaaaaccggattatcttgaggagcacaggaatgagcctctcctatttaatcagcctgggagctgatatccctggccccttctgaaccggcccactcttctgaagggcttgggtgcacctgggcccagtggtttgccttctctgggacctctggcttacagagatgggtcatttgttggatttttcacatccttagttttatttccttacctttggccattagttatctatagattcttctaaacctgagaatggttgtctccttgtgagaaggaggctctttcagttcctggaagcctctaagttgtgcagcaaagtctctttccttgacatgcccacggctctctgctctgtggcctttctctgcacctaccacagacctcttgctccagcagtccttccacacacccctgcatattttccccaggccagaaatctcttctctcgaactccctgttcctgtggcccccttcatcagccttctaagtcccacctgtttcccagctgtctccagcagagcacttcctcagagaagcctcctctgatctctgagtggggaagtaagactgtgaagggaagccattgtaaaaagattggtactgtcagtgtcagagcttaatcccactggggaaaatccaggagcaagtgtaaacccagacctcagagttaacttgctccaagtgcgagggagctgtggtatttatacacctttaggataatgaggccccggttctgtgctatcttagcaccttgctactagctgtcgcacttastagcatgtggtgtgtctgcacagtggactctctgaactgggtgggatgtttcccagggcctggctggtggttgaaactcagtaagtctttcaacaagggagtgcatgatgaagccargtagcactaagaaaagtgcaggtgtgagctagtggcaaaawgactggaggtggcccggggctagaacacccagagaggagcatgaactgcagatcgggctggattggggtgaagactcactgccaatggcrcaccctctcctgaggaaatctaggtagagcccagcccaggaggaggaagggaaggttaaggcaatctcagccataactccagctccttgaccgcagggatctccagtacagggttagacacttagtgggttcagtaggtgtattagtcccttttgtgttgctataaaggaattcctgaggctgggtgattcattgattgacagattgattgattgattttgagacagggtctctcactctgtcgcccgggctggagtgcrgtggtgcgatcacagcttgttgcagcctccaactcctaggctcaggtgatcctcctgtctcagccccctgagaggctgggaccacaggcatgtgccatcatgcctagctaatttatatatatattttttgtagagatggggttttggcatgttgcttaggctagtctcaaactcctgggctcaaatgatcctcctgcctcagcctcccaatgtgctgggattacaggtgtgagtcaccatgcctggccttgggtgatttatttaaaaagaaggttttatttgtctcacggttctgcagaatgtacaagaaccatggcaccagcatctgcttggcttctggtgaggcctcagaaacttctagttatggcagaagggaaggggagcaggtgagtgtcacatgatgagagagggaacaagagagtggtggggaggtcccagactctgtgagaacttcctcattaccatgaaggaggcatcgagccacaaatgagggatccacccccatgacccaaacatttcccaccaggcctcacctccaacattgggggtcacatttcaacatgagatttggaggggacaaatattcaaaccatatagtaggtatcttcatttagtttcccccagaagcagaccctgaaataaacatcttcaagtagatgggtttattcacatcaagagtgcaagtagtttatttgggaggtgaagagagcaccagtaggggactggggaagtaagaatgtgaagggaaagcatccccaaaagattggtagtgtgggtgatggagcttaatttcactggggaaattccaagagccagtgtaaactcagacctcagagttaacttgctccaagggtgaggaagctggggtatttwtacacctttagcagcaaatgttttagtgtaagaaccccctgggactccaccctggaggaagttctgcttcaggaggcttggggtaaggctgaaaatgtgcatttcttataagctcctatttgatgcttacgtagcttgtgtggggagcacactttgagaaccattgggttaggtaaccacgccttgagccctgtctgtgagtcccattttaatggttcacatttcagttctacatgaagatgttcagtgagtaagaaaatgggaggaggaggtatttggttcagccagaccataaatcaatatccattcatcatcctcctcctcctctcccaaatacccaggggaccgggagttgacgatattaacatgatctccctcttttcagttcctggttctgttctctatgttttttccccgggccagaaatctcttcdcttgaactagaagaggaatctaatatttttcattttattaagatgttctttgtaactggtattatcgagttttgtaaatgttctacgtctatttaaaaagacccccacacactgtaatcatggaattgaattcctgccagwcatcaattttgtgtattctggtaggctatgagtttattttttttaagtctttttgataatggtgttttaaaatctccttttataatgactcttccttcctgtgttcctaatacttgttttctggtatcttgttgtcagtttctttggcaactatagatttgtatctgcatggcttcattaatagtgatggttgttaccattatgtaatgctctctttatcttagaagcatactctgttttttttgccttgaatttagttcttcttacattaatattgttgttcctgcttgctagttcacatttgattaaaacttttttttcccagccttacaattttgttttctgatcttaaaagtaatgcgtgctctttgttggaaaattcgaatgtatcaaaaagcaaatataattggaaaaaaataaatactgaagagactaaccagaggcaactgctcattcgcccatgcccttaccctctttaatgcacattttgcatagttaagatsaatagtataaacaagttgatgttctgctttttcccccgaagtgtaaagcataatcagtgccccccttttttttttattaaaaaatctctgcaaacatcattttaatgagggcagattgatctattctcagactcactaagctctggtcaagatgggctcagggaatgggtgtacaaagccggggcactctggagaagcagacragatgagactgcagattttcctttgtcagggaattttgtttttattttaagtcatttgtttcmctcagtttgaatattgacattggcctgtgttaagcccaggtaagatgcaattctttgtactctgtacatccagctgaaatcattcaggcaacatttgccagaaatcactgctcaccaagtccagcgagcattttgctgcccagatcttttggcaccatctgatattgtcacgcagcttccttgatggggtgtatcgctcctcctggtgccccgacactactctctgctgattctccccgatcttctttttgcagctgttcttctcttccttggtttcttagtccatttgtctttctacaaagaatacttgagtctaggtaatttataacggaaagtaatttatttcacacacggttctgtagactgtacaagaagcatgatgccagcatctgcttctggtgagggtttcagaagcttccactcatggtagaagaggaaggggagctggtgaggtcacatgatgagtggagagagagaggggaggaggtgcgaggctctttttaacagtctgatttcatgggaactaagatggagaactcactgaattccrtaagaatggcaccaagcctttcgcgtcyatgacccaaacacctaccaccaggccccaccttcaatattagggatcacatttcaacatgagatttggaggggacaaaccatatcactcggccccctcccttcttaaactgggatcacttgtgattctcagcatcaggacacactgggcagtctgctccactttatgtgttytgacagtttcccattggaattgtccaataggatctaccactcaagcccagaacaattcaaacctgtaaggcctctgtctcccagatggtcatcctgggtctttgtagctccattggtccaatgatgaacttactgtgtttgccttgatctttgtttgggtgaccaggatggaggaattcgggtgcacagaggtatcacagtcataatacttgacacactccatcactggttcatgcatagccattctttatttttcctcacttctgattgagatgtaattcacataccataaaatatactataaaaataaaatagaccaggcactgtggctcacacctgtaatcccagcactttgagaggccgaggcgagcagatcacttgaggtcaggagttcgagaccagcctggccaatatggggaaaccttgtctctactaaaaatacaaaaattagctgggtgtggtggcacgtgcctgtagtctgagctactcgggagatgggggcaggagaatcacttgaacctgggaggcggaagttgcattgagccgagatcatgccattgcactccagcctgggcatcacagcaagagtctgtctcaaaaaaacaaaaaataaagtatacaattcagtgattttcagtatattcaaatgatttgcacctatcaccactacctaattccagaacattgtcatcacctgcaaaataaaccctgaacctgggagtagcctctcccaattctacccttaccccattccttgccaaatattaatgtattttctgttacgataaatttgcctcttctggacatttgataataaatgaaatctacaacatgtggccttttttcctggcttctttcactgaacataatgttttcaaggttcaaccaaattgtggcatatataagtacttcattctttttatgamtgaataatattctgagtatagatacagcacattttatttatctgtttatcagtttagttgatagacatttgggttgtttctactttggggctattagggataatagggctatgaatattcatgtacacatttttgtttggatatgttttcagttttcttgggtacatatctaggagtagaattgctgggttatgtgataattctgtggttaactttttgagaaactgtcaaattgttttccacagccagactgtttttcacctcagctgcaccattttacatgatcaccattcatatatgagggttccagtttctccacatccttgacaattgttacttttttaaaattatggccaatctagtggatataaggtggtatcttgtagtttggatttgcatttccctaatgactaattattttgagcatcttttcatgtgcttatttttcattagtctatcttctttggagaaacatctattcaagtactttgcccattttaaaattgattatttgactttttaaattattgactcataattattctttattctctttatactcatctttatcaaatattctgcaaccaatttttgcaaatatgcttgcaaatattttctctctttctgtgggttgtcttttcacattcttgataatgtctttggatgcacaaaagtttttaattttgataaagtccagtttttctttttttcctttgggtgcttgagcttttggtgtcatatctaagaaactgttgcctaatccaaagtcacaaagaattgaacctttgttttcttctaagagttttatagtcctagcacttccatttaggtttatatccattgtgagctaatttttgtatatggtttgakgtagggatccaaattctttctatttttcttttttacatatatagttatcccatgagcatttgttcaagagtccaatttttcctcattgaatggttatgtcacccttgtctaaaatcaacttactgtaaatatgaggagttattttgggactctcaatcctatttctttgatttatgtgtctatgcttatggcatgatcacactgtcttgataactttttctttatagtaaattttaaaagtgggaagtgtgagacctctcaccttgttcttttttcaagattgttatgtctattctgggttccttgcatttacatattaatttcaagaccagcttgaacatttctctgagaaatagctgttagaattttgttgggattgtattatatgtgtaaatcaatttggagagtattgtcatcttgataatattaatgcttgtaatccatgaacatagatgtctttctatttatttatgtctctaatctctttcaacaatgttttatagttttcagtatacacattttacactgccttggttaaatttatttcttaatgttttattctttttaatactattataaattgaattgttttcttaatttcatttttgcatcatttattgttattgtatagaaacacaacttatttttgtatgttcatgttgtatcctttaactttgctgaacttgattattagctccagtaggtttttttgtagattctatagagctttctatatagaatattgtgttatcttcaaatagtgataattttacttattactttccaatctggatactttctatttttcttgcttaattacctcctctatttatttttaaaaatgtatttattaataaatatctcttttcctaccatgtcaaggatgagaacattcacccatataccttcctaagggtttataaaagcctcttctggagaagacggctaagtcatgagtgagctcagtaaacatgggactcaccatagtgggctattgtgtggaccaggtactggacttaaggcaaaaatctggacagaatgcaatgggcttctctgtatttactgcttctgatcttatcaagacctactgcctatcctcaggagcaggtyaaagcagaacatgtcttgagagatacgagatatgatacagtgaatgtcttccactgatccaggcagtagacagaaagcctgtagtcagaacatccaattatagataagaatgggtgctatactcattcaggcaatccatcctcagcttaaaatgaggtacatttgcaggagcagtgttaaaaatgacaactctcgctgcatctatctgaagtcacactgccctgttatggaggttggcctctgtggctgtgcgttgttgtcgtcttggatctcccttcacyrtcttcttgtggactctctgaccctcttctgtgctgtctcctgtgctcttctcttggtttatgttcttattttggtgraacacaacacctggaagcttcttaagagagactgcaaggaagagaaaatctttcaagttcactcatgcctctaaagatggctttagcctcatcttctaggtgaatgatggtgtcgttgagttagatgttgccttctttcagaattttgatggttttgctccattattgtctttrttgttgttgttgttgttgttgttttagaagaaccaaaggcattctgatttcctggttttttgcatgttcttttttcctttctggaagcctgtagagtctttatcttgtcaccatagttttaaatttcacaatgatgagccttgatatgggtcagtttgcattgattagatggggcatttagtggcttccatcctcaatctattgtctatccatttttggaaatttcttggaattttaattgataattcctcctcattttttctgttctctctttcagcatctttcattattctagtttggggcctcctaaattgaacctctaattttcttatttttctctgctatcttatctttcgctatctgatatttttgctctgttttctttattctygcttcagtttttttattcttcccttctatccattttttctatttctgctatcatagttttacttccaagtgatcatttttattctctgaaagctccttttataacatattgtccttttttattggaagcaatatgttttcttgtccctggaggatgttaataatattttttgttttaactttttctccctgcatagtctgtttctaaaagttacatttttctcattgatgtttagtttctatctttcatgttggaggctttccttagatatctggtgagtcttttctgcttatgattatctcttaaatagtgattagacagccaggggctgggtggagggggaatggggagttattgcttaagggtatgggatttgtctgaaaagatgaaaawagttgtggaaatagatgatgatcgcacaataataggtatgtacctaatgtcactgaactgtatacttaaaatggttaaaatagtaaatttcatgttatgtccattttatcagtttttaaaaagctgatcagacattgtgcacttgagttggacttactggatttgacaatagagtgatttgtgtgggctgaaacaagaagtgggagtgggggctggacgtggtggctcacgcctgtaatcccagcactttgggaggctgaggtgggacgatcacttgaggtcaggcatttgagaccagcctggccaacatgatgaaaccccgtctacgctaaaaatacaaaaaattagctgggtgtggtggtgcacgcctgtaatcccagttactcaggaggctgaggcagcagaattacttgagcccgggaggtggaggttgcagtgagctgagattgcgccacggcactccagcctgggcaacagaatgagattccatccccccygccctcctccaaaaaaaatgtgggagtaggaatttacygatcagkttcttttcaaatagccttcgtrctagtcttccttattctggtctgtccattttacccccagttccaaaggcacctgctgctgccggttccattgcctcttgagtgtcctctggtatatatcgagttgatttctcagttttgggcattgttagcttgggatcatctgtcacacatctgtcacttggttaaccctctgattctgcgttctagcttcctcaatttcatggctgttgtcttgtcttgcatttcctctggctttggarggttatggtttttgttgttgytgtttgtctattttagaaatccttttactgtagtttttttgtgaattttgactagtggtctctgattcatgagttaaattcatcatcttattctgaaagttttatattcatctttgagaatgtttaatataaattgataaactgtcttccaggtatgtggtaatgtcacatgaagagtatatgaaaggcttttttttctctgtattcttaccaacactgaattttattaatctttgccatctttgttgttctggtgcaggggaaatggcattccatttttaagtgtgcatttaaaaaaatagtattgatgatgaatactttttcatatgtttatatattttttagaggtttgcctattgatgactccttatcccttttttattggagtatttatctttgtcttattgatttacaagaactttttattttattttactttaagttctgggatgcatgcgcagaacgtgcaggtttgttacataggtatacatgtgccatggtggtttgctgcacccatcagtccatcatctaggtttcaagccctgcatgcattaggtatttctcctaatgctctccctccccttgtcccccaccccctgacaggccccagtgtgtgatgctcccctctctgtgtccgtgtgttctcattgttcaactctcccttatgagtgagaacatgcggtgtttggttttctgttcctgcattagtttgctcagaatgatggtttccagcttcatctgtgtccttgcaagacatgagctcattttttttatggcttcatagtattccatggtgtatatcaagaactttttatatattaaacaaaccttttttacatcactttgcaggcatttctctcaacttttgcttctcactttaattcattcataatcttttttggcaagtataaattttacattatatagtcaaatccatcagtcttttctttttgataccaaagtcttaagaatgtgattcattatgcttagactatacaaatatcgacaactatttttatgagtaaatgtttctttccaaaataaattccagacagaggaaatatttttatataaagtgtaagaattttttaacacagagactctgtcccaaagtatggttatctcaatttaatagtaagtcctttaaccaccgatatgaaattcactgtttttatctgctgaattatttaatatttggaaacactgaagctgaatcacatgatgactgattggttataaagaggaggcaggagtcaaagaggacccccagggtccctgctcaggtgacaagatgggtattggtgcttctcattaagaatgggatatgctaagaattaagaatcacaggtttgggaaggcaatggacttcactttttggatttgtcaagttccaacatcctatggaaatttactgtgcctttaaaacttaggtgagttgtaactttagccataaagttttccttaaactactatgagaagcttctttgtttttacaattagtgtcctcaatactcttttctttttctttttcttttttttttttttctgagacaggttcttgctctgttgccttagctggagtgcagtggtgtgatctcagctcactgcaacctcccacctcccaggttcaagcgattctcctgcctcagcctcccgagtagctgcaattacaggtgcccaccaccacacctggctaattttaatatttttagtacagatggtgattcgccatgttggccaggctggtctcgaacttctgacctcagatgatctgcccaccttggcctcccaaagtgctgggattacaggcgtgagccaccatgcctggccctcaatactcttttatatgtcttattaatacttcacttttttaatttaccttgttaccttctttgttgtaaagcaggggtccccaaccccccaggccataaactggtccatggcctgttagggactaggccgcacagcaggaggtgagaggcgggtgagggagcaaaacttcgtctgtatttagagccactccccattgctcgcgttaccacctgagctccatctcctgtcagatcagcagtggcattaaattcttacagaggcatgaaccctattgtgagctgcacatgtgaggaatctaggttgcgcgctccttatgagaatctaacgcctatgatctgtcactgtgtcccagcacccccagatgggatcatctagttgtagaaaaacaagctcagggctcccactgattctacattatggtgagttgtagaattacttcactatgtattacaatgtaataataatagaagtaaagtgcacaataaatgtaatgctcttgaatcatcctgaaaccatccctctgctctgtccatggaaaaatggtcttccaccaaagttgttcctggtgccaaaaaggttggggactgctgttctaaagcaatagcatggggaggaaagagaggaataaaatcccagcccaaactttagctatgtggtcttggccaaggcacttaacttttctgaccttgtgtaagttggggtaatagtagctttcattcagggttttcattgtgaggtttagaggtaatacttgcaaggcacatagtgcaagtcctaacartatcataaagggtactgttgagtgtgctcatgacattatttgatttgctaactccagttcattcatcggtattcaacttgcatatcatccacactgggaaaccatactgaattgcattcatttatctgcctatctctaagtggtaagacacttgatggtaagaccaatagcttgctctgtgccataatcccaggatctagcccacagctaaattacagtaattgctgaataggttaatttcaattgcacatgtgcagagatttttttccccacttctggaattgttctggaagcttttgcatttcacattgtacatattttggcttgaatgctacagttattttggtttaggtgtcagaaattgcctatctcccatcaccatcatttgagtttcttgatgatttggacagttgtacatcttgtcactaatacttccctgtacgacaagcatatctgatcaacatcttgtctcggttggttgtattcaaaggttgaaagcaagatggctgaaaactttttggagtggaaggttataccctctgcacttccaaaagggattttggagaagtcacactggcmttgtttgcttttcttcttggtttataattgcagagatgggagaagtcttgtgtttccaagagataacattcttcctgtgtcgctgaggctctgagtgaaatagccgagagacaacttgttatcacacagctccatgcttggccaggctctctttatttgaacatcacctgccttcccccctgcctgtaaagagccttcctaatcagtaagaatacttgtttttgcccccaaccagatcatagcaatgtgacagcatttgctatgtgggtctgtaatcctaactaggttgtgcatttacatttctctttgtgtttttttaggccccagggaggaaagaatgagagtgtgtatctttacacaagcaatagtgtgtgaaaaccccagctaaagcttcagccactaactggcttttaaaaacaagaagaacaacaacaaaaccctttttagttcaaactaattataggttcacagaaagttgcaaagatgaacaggaaattccatgtagccttcgctcagtttctcccagtggtaacatcttgcaaaactctaggatactgtcacaactaagaaattggctttggtacattggctttttagcccagataattgagaagtgtgggaaggtcaggtggtttggtattagcagagctgatgttcagctggaatgtgctacagtgccattccagtccacatctgctctgatgttatatagctcgatagtctccgctagctagaagaaacatgttaggttctgcagcccttttggatgctaataagagctgctattgatagaacactcgtatgatgcattagtaacttaacgtggacatttcctgtaagcaggcatgagcatttcgtttgcgcataggattcacactgcctttgaccttggaaacttcagggtcctgaatacggagcaccccagaatgctagagaaggatgaactggccggatgcctcacctcagttattccactcccggctgccaaacgcgtttaaagaaaactcgaggaagaagtgaccaagcaccagcgtgtaaccctgttctccccagggctttacatttcttgtgttctgttttgctctctctttaatgactgtgactttggctatttcaaggaagagattcgccagcttctgagcatttggaatcaatatcaccgtaaataagaacataatgaaagaaaaacacagcccagcctgtagacaaatttgattgctgaaattcacgtgttattattagaatcagctgcaaatgccagactttcaaatgcctttgatggggtaaggtaggggaatgctcttttaaattggggagacaacttggagctctcacctggatagcctatagcttatgcgtactatgatgtttccttgtaggtttgggctactcgtatttattttctaaaaggtaaaatgtaaatggaagaagcagtagagatgaatttctcaacaaaggaattggaagctgagatggctttcctttacaaagtgcccctcatgaatgcacaactcagtgtgatatatttggttyaacactttggtattttgcacctcacatctctttgcttttcttttcgtcttttgctttcttttgtcctttttgtccttgctttgatctcactatggaatcgccctcaaaatgctttcatacacagcaaaagcttccctctttaatctctctcattcttcctgaagtttctcactcttgcctcatttttgctccagcccatagtcagcaagtgcattatttaagtctgcaaagctgagagatgctcagagaataaaatatgcaatgcagccacctcctgggttatttcatcttgcagttttagatgcttggttcctcaccatggctattcttcaagcccaggatttcagagacagatgggcccatgccatagtggcaaggctggggtggggtgtgtgtgtatcaccatatatgtggctcctgtatccctgaggcttcttcagagcttcattgtattgtttagaagagttggaggcccaaaagattccctggatgcccactcttttgaaacctcttaatcagcccttaggcctcttctctgcggagcactgaccatagtcagcagaaggcagcctagaaaaaggaggcgcctgcctcaagtccagagcctgctgctcccatcctgcagcctggccaactttccactcatggttacagccctaatcctttatcttcactctctgaaactggtgctgatggctgcagattcagaagaaaatgggatcatcatactggtgctttgcactcacatttggtcctcatgcaaccctgtgcagtggaataatgttgtacacactgataattagtctgtaatcagaagtgtgggtgcttccaagctacttgagggagccagctctcaggacaagcccaggccaggccacagcagctttgtattagcagacaaatgacttgagatttcacaacatcacattcacaggaatcagaggtaacaatggtgatgcatgtaggcatgccacttacaaatggtgtgacctagggagagttgctggccctctgtcttagtccatttggggactgctataagaagtacctcaggttgggcattgtggctcatgcttataatcccagcactttgggaggctgaggtgggaagatcacttgaggccgggagtttgagaccagcctgagcaacataacaagaccccatgtctacaaaaaataataataataaaatattagccaggcatagtggtgcatgcctgcagtcccagaaataataccgtaactactttgtatccataaaaataaaaaataacaaagttaaacaaaaatgccttagactgggtaatttataaacagtgaaatgtattgctcacaattcagggggctgggaagtccaaagtcagtgtctggtgagggcctagtcctcatagatgtctctctatgtgtttctatgtcttgtaagtggtgaaccagctccctggggcctcttttgtaaggacactcatcccattcatgagggtagagtcctcctgacctaatcagctcccaaacacttgccctcttaataccaccccattgaggcattgattggcatttaacatgaattttgagggaacacagacattcagcacatagcacacgctctgtgcttccgttttctcatctgtaaartggggtcgatcgtgcctttacctcacagagtctttaagaggtatgaaggaattgytgtaggccaacagcatgtggctcttaataaggacccagtaagtatgaagacaaatgttgtggaatgttacgagtttccaagacagcccattcactggttaaattaccaaaggagatctaatttggctgactagtgttctggagtgtttcctgattagctgacatttttagtgagcttggttagcaatttggggatataaatatttcattatagacacagacaagcatagtatttgaaatgtttgaaaaatagtgattgtcagcagaaaaggaactctggcattggtggaatctgcctccccagttggtattctcactgagaaactaacaaagcttccgcattgggccccttacttgcacgggtgcccttcgaggtcatctgatggccccttgttgtgtgtttacatgtcatgcatttttggagaacttacaaaagtaagcttttaaaatgtttctcaaagagaatgcctcaaattgtgtaaatttcaggtcccacaaaacccaggttcatttctgggatttgctatctccattggacagataagaaaccccctaggttgcatgagcagaatatgcaaccgagtttctccccgcgccaccatcttttcgttcatttttaaagataatattttaaaactttgtctaataatatttttaaaatattttaaaatagtctttgtagggctgcttttatacatttagctgattggttatttcaggcataaaggtattctcaggcgcacctgtatttccaggtggttttttttttttttgagatcgcatcttactctgtcacccaggctggagtgcagtggtgcaatcaccgctcactgcaacctctacctcaagctgggctcccacttcagcttcccaagtagctgatacccaagtgttttcagtctgtgttttatgttctttctagggcatcaaagctaattcttacatatataaaatattgaaatctctctgaaaaaaagaaaaaaagagatgatgcagaaatgtcaagtgtcctgactaatgtctgtgccaaactctgcgttgaagaccattttttcactgtgatctctgtcataaatccctaagcacagagaactggaagtttccattggggtggagagaaaggccggcatctgggagggcccagggtatggtcaccatgcaggggctggattctctccacatccagtcttgaagagctcaggaactcaagtcccatcaggatgaggagtcttatctaagtgtctcaccaaatgcttccagacagaggtagacttggaaacccatggaacaagctaggagcagagatgtgcccagggagaaggtggcctaggaggaacccaggggaggggcaggccagctgaccagactgggctttaggagcaagcctgcagtccatcaattaccagcatgggggttggaagaaccccctggccacagaatatgaatcagaccttcagcaaggtcaagggttttaaattcacacacacggtccaggcatggtggctcattcgtgtaatcccagcactttgggaggctaaggcaggagcatcacttgagcccagagttcaagaccagcctcagcaacatggtaaaaccctgtctcttcaaaaaataaataaaattagccggacatggtggtgcatccttgtagtcccagctactcaggaagctgaggcaggaggatcacttgagcccaggagttggaagctgcagtgagctatgatccggccactgctttccagcctgggtaacagaatgagaccctctctcaaaacaaaacaaaattacacacaacataaaatcacctcttctgcaccgtcaaaattaacagacataaaagaccacatattttacgactccattttcatgaaccatgtgtattaggcaaatttataggggcagaaagcatgttagtggtcaccaggggttgggaaaggggagatggggagcagctgctcaatgggtatggggtttatgtttggggtgatgaaaaagttctagatagtggtgatagttgcacaacattgcgaatgtactcaatgccagtgaattgtatattgtaaaatggtcaaaacattttaaacatggtaaaaacaatgaaaaaagtgaaccagtgcttttgagatgtttggggtttgcgtgagaacgacctgggggtgctggccagttccactaaggcccactgaattagggataccgagaaaggagcctcggaacctgcattttcataaggtccccagtgattctcactctgggaatactggcaggcattttcattctattttgtttcttaattggaacgtgccatatgtgctatgttctcgtccccagctgtcacaacccatgcattcacagtgagcagcatgcccaaacctcagcagctgctggyggggagaggtgttggtgataagcgtggcagtggtggcaatgggagttgatggtgtcagaaggagtgttgatagaattgtggcagtagtagcagtggtagcaggaacagggaatgaaagcagaaggcaggaccatatgggatccttgtccagggactgacctaattgtgagattgccccacgcagaggtggccagccatcaggatcccagtattggagccaagcttggtggctcacatccataattccagagctttgggaggccaaagtggggagcgggggagggattgcttgacgccaggagtttgaaaccagcccgggtaacatagcgagacctcatctatacaaaataaaataaattagttgggcatggtggtgtgtgcaggtagttccaggtactcaggaggctgaggcaggaggatcgcttgagctcaggaggtcgaggctgtagtgagccgtgattgcaccacttcactccagcctgggcaacaaggccagaccctgtctctgtctctgtctctgtatatgtgtgtgtgtrtgtatgtatgtatgtatgtatgtatttatatgtattttatatatatatactgtatatgtgtacatgtgtatatatacatatatatacacacatacatatatatgcacatamcacamacacacacacacacacacacacacacacacacacatttaaatatatctatattttaaaagattccagttttggaaatggcatgccaaaccctcaccatgtaggccaaagtcacttccaaggggttcagttttttagatgaggcaggacaagtaggtcgtaggcagtggggaaagtggagatggacagggcaacactgggattctggaatgtcagctcagttggagtaagctctggcccacactcagggtctaattcatcccagatggagttaggcaggggggtaaatgctaagccagagccacccaatatgcacttagcagaccagttgatgcagcagctccccatttgaagcttgtaagaaatacaagttcttgggccacctcagacttactggtgattcggatgcaggttaaaggtagaggaacactcactcatctaagcttagacagattctcctgaatctccatactctgaagggcaattgaaatattcagtaagtctcatcatcaaggcttaacaactgtgtgagggttgagaggtcaggttgcccaccattgtggatgtgcagacttggccaagtcctggactgggtggccacttcccaagtacacataaaaatcccaagcactgacacttttgcattggttctggaagcaggtggagctgagtctgttttaggaccaccaggttcgtatgtccactgtgcagtaacagatcaattatgctgagacagcaggatttgcaacagagaaagagtttcatgagtatagggtagccaagtgaggagacaggaagagatcctcaaatccacctccccaacgatttctgggctggggctttgaaggggatcatggaaggtgagaggctggagaatcaaggtcattcattgatcagggtaaaggggatgaaattatcaagatgtggaaactgcgttctttggtgagtcagcttcttgtggggtccttcagaccagctgatgtcagcagtttcattggtatgcaggacatgaaagaatatctcaaagggaaaacttaatattttataatgttcaagttgttatctatagagcagttaaaggggactgtaatcttgtaacagggtctattgtcctagtcattctaggacaataggcactaagaaactatgatgaaacaggtcagagactaatgattaatgctgaatgtgctgcacgcttggtttattttaattttcccctcacttctttcctgatttttttttttttttgagacagagtctcactctattgcccaggctatagtgcagtggcatgatcttggctcactgcaacctccacctcccaggttcaagggattctcccacctcaggctcctgaatagctgagattacaggcgtgtgccacaaagccaggctaatttttatatttttagtagagacggggtttcaccacgttggccaggctggtcttgaactcctgacctcaggtgatccacccaccttggcctcccaaagtgctgggattataggtgtgagccatcacacccagcctcctgattaattttataaagtgtataggggcaatttcaagtctactaggtcaatacttgctcctgagcagggctctgagcccagggatggtaccgatagtttattctgtcatatcactgaaagtgcgggattgagacagaattctgtaatgttctttgctttagttcttaccgttttgtagctttctttttgccaatttatgctccatgagcctggatgacatgtgtttgttttattgttaaggagcaggtatgcatacctccctctccagtccttcctgatcacaggcagtgttcgcytctccccctcaacctcctcaaatgctgtttatcaaaatcttaaaaaacacaatggttcccaaatggcacttggccaattttgtattggattttataacatttatttttgtcgaaatgagtttctgcatttatttttgcagaaatgagtttctgttttcttctctgagttttttgtgaggaaaaaagaaagtaagatgtttttcttagtgttcttataatgtcctagaatggtttcatctgttaaggatgataaaggatcttaggtgaaggggtgactttctttttttttcttttttgagagagtctcgctctgtcacccagactggagtgcagtggcacaatctcagctcactgcaacccctgccccctgggttcaagcgattcttccaccccagcctctcgagtagctggggttacaggcatgtgccaccacgcctggctaatttttgtatttttagtagagataaggtcacaccatgtggctaggctggtctcgaactcctgagctcaagtgatctgcttgtctaagcctcccaaagggctgggattataggaatgagccaccgtgcctggccaagggggtgactttctaaccagtgtcaggttggggatttgtgtgcttccatgggagcctgggggccttgttttacttggctaatttatagactcattcactttaaggtgaatttgggctcttgcaccccacctcttcttcggtttctctccgttttcaaatctcaacaccctaatgctcttaggctgtctcagatgtgttccaccagagccaggcttcctggaagtccctcttgagatgtcccactcatccagttctccttgtattgaccctgcccctgcaggagacagctgcatctgcagggatttcttttttctcactggtactatcaggggccttctgtttgtcttgatcaacggaccattctcagcttgcattttctctaatgcatttgactttcctgaccctggaggttgagcagcttttggaggacagggactctgaaccttctcacccacagaggctcctttaaatatttataaaatgaatgcacatatccttcttccagaaactctgccaaacacttcacaggataatgcttcggaactggtgtcataggagcattatcctgtaaagtgctggactctgtttcaacacctgcagatgatgctcttgggctctcargtttgagaacttcatttcctccttggagtcccgtctgtaccgccttgagtatggcttctccagcccttcttccttctacattctctatccagccctgtacaaaataaaagacattagctgggcatggtggtgcacgcctttagttccagctgctcgggaggctgaggcaggaggattgcttgagcccgggaggtcgaggctgcagtgagccatgattgctcactagccctccttcctgcctcctaaatacatgtgttccacaacgtgtggttctaagtcttcttccctgcatttcctggaactgtcaccttctctcctaggccatcatctccctttttttttttttgagacggagtctcgctctgttgctgaggcttgagagcagtggagcaatctcggctcactgcaacttccgccccaccaggatcatgcgattctcctgcctcagccccgctgagaggctgggattacatatgccygccaccacacccggctagtttttgtatttttaatagagacggggtttctccatgttaggacatcatctcttatcactcagtgcctgacacctctgccctgttttctcacctccagaccattgtcgtggttcagctgcctaccccagaatgtcctctggccccctcaacctgtcctcagagaaactcatcaacttgttcttctcttctcttctttttctctttttaaatcaatcttatctggctaagtgtggtggctcacgcctgtaatcctagcactttaagaggctgaggtagggggatcacttgaggccaagagttcgagaccagcagggccaacatagcaaaattctgtctccactaaaaatacaaaaatgagccgggcatggtggcaggcacctgtagtcccagctacttgggaggctgaggcaggagaactgtttgaacccaggaagtggaggttgcagtgagctgaggtcacgccactgtactccagcctgggtggctgagcaagcttccatctgaaaaggaaaataaaataaaaataaaataaatcaatggcatcttcccagtttcctagactgaaactttgatgctcatgatactgtcatctaagtagatccaatttttcacttaggtgttttttggtgtggtattttagaatagtgagagctcacgtccagatctgctgcataacttaaacaactttttccgttaatgctcccagccaaaacagtttctctgtctgtgactcctcacagcactcttcctccgtgaccattttttttgggcgagtgggggccattagcctcatttaccttataatattgaatattataatttgtttttattttattttttttttaggcagagtttcgcccttgtttcccaggctggagtgcagtggtgcgatctcgcctcactgcaacctccgcctcccaggttcaagcaattctcctgcctcggcctcccgagtagctgggattacaggtacccgccaccatgcccagctattattttttgtatttttttttttagaagagacagggtttctccatggtggccaggctggtctcaaactcctgatctcaggtgatgcacctgccttggcctcccaaagtgcgccttcctataatttttaaacgtatctcatctccttaactcgattgtaagcatcttgagggagcacttgtgtctgaattgtctttgagcacaggccagagcacaactcagtatcttataaagtccagaatcacactgcagggactgggaaggaagcctgctcagtgtcacttgttcttaaaccctgatcattggaggtggcatctaccttgatgtttccatacactgttgtttggaacagtgtatccctgtacattgtaagagtgagaatggtgtctactgctatacagtaggccctagactttataaatcattttggtggccaggcacagtggctcatgcctgtaatcccagcactttgggaggctgaggtgggtggatcacctgaggccaggagttcgagaccagcctgaccaacatggcgaaaccccatctctactaaaaatacaaaattagccggctgtggtgacacatgcctgtagtaccagctactcgggaggctgaggcaggagaatcacatgaacccaggaggtggaggttgcagtgagctgagatcgcgccactgcatttcagcctgggcaacgaaagagaaactccgtctcaaaacgtaaaaataaataaaaataaaaatgatattggctagttagaaagacaatctgttgttcataggaagttatgtaattgatcaacattaataattatgataaaccaattattattagatttaccatttattgaatgcatattgagtgctttctatatagcttttcctttagttgtagcagccataaggctagtaccaaatgattaggccttatccttttactcctttaatacctcccaaagctctttagatgtgagaaggccagtggtaatgacccacactttcttttgccaaccttgccaatccctacccatatatcttccctgaagtctcgcaacttcttaacaaatgaggaactcatttgatacccggatgtggtgagtgatgtagccaggagctgacatcctgttcctgggaagagccacgactaagttgcaggtcacgtggcagctaagaggtaacagtgcctccagaactcctggcatggtgcccagcgctcagcattcagaatattctccctgaacttacagagattcctgcagtcacaagccaaccctggtcagcaggcgggattccccttgtagcattccatgacctgtggcctttagtgacatgtccctgagtcccccagcacccatgcaggacatgtacctggagtgcaagtatctaagaatcccctccctgttagcccctccttttcctccctatacctggtgatttttatgcacacaaagtatcactttttttttttaaatgcctttakttttatttattyttaaaattagacaccaggtctttctctgttgcccagaatggagtgcagtagtgtaactatagctcactgcagcctcctgagttcaagtgattcttctgctttggcctcccgagtagccggaagtacaggtgcacaacactgcactcagccaagtatcagtctttatgtctatagagttagattcagttgagttgtgtttcagctctcccgttagcccatatgtgaccttggaacaggttagcctccctaagattatgtcttcatttgcaaaatagaattaatttagttaattaatgaaattaatctagcaacctcctagggtttctgcaaggataaaattagctcatagaaatgaagcactttgccacctgcttgttgcagaagggagggtattcaatccctggtagcattagttctgcctccaaggtagcatttctactactgagcaaagacttacattgcatcccaaggcacgtactgtaagaacgagtctgtgtgcagatggaaaagcccatatagaatttgataaaccggacaaggattctggccaagtttggaggaagggccactaagaaaaggaatcttgaaggacgtctgccggctcatagcagccgggatataaaagccaggcctggttcccatcccrctgtacggattgcaaactgtcagaagatagctgtcctgggtgaatgcatcagagatgtcttctgactcctagactgatgagattttcttttctgccagaattactaacatgcgattttttttgagatctttgaactccctgaagatctgtgggcattgcagtgggttagatgcaaatttgaaatgacatgtttatagaccttcttgcatttttgtcrtttgcagaggagctgaaggtccccctagaggagtatgtccacaaacgctaccccgggctggtgaaggtggtaagaaatcagaagagggaaggcctgatccgcgctcgcattgagggctggaaggtggctaccgggcaggtcactggcttctttgatgcccacgtggaattcaccgctggctggtaggtcatgagctgaaactcaggggtgctcaagacctgcattgtggttgagaggggctggaatctgggaggtgggacatttcacctgttacctgtagtggcactgggagactagagagagactcgtcaaagaagaaagtgagaccattgtctgggataaagctagggagcagggagaaatttgtctgccrtctgttcagttcaccatcattggcatcatcgtcatcatcatygtcatcaaaatccccagtgaaaatgttttatcaggctgggcatggtggcttgcgcctgtaatccctacactttaggagcccaaggtgggtggatcatttgaggtcaggagtttgagaccagcctgggcaacatggtgagaccctgtctctactaaaaatacagaaattaacctggcatggtggagcacgcctgtagtctcggctacttgggaggctgaggcaggagaatcgcttgaacttgggatgccaaggttgcagtgagcctagatcgcgccactgcactccagcctgggtgacagagagagactccatctcaaaaaaaaaagaaaaaaagaaaacggtgtatcaattagataaaactcaacagaatccttgcaaatggtacaagacagtcatatttttcttgttctcttttccttctttgctgctctgtttgcagggaaggatggttgtctgtcattgtgagaaaagagatatagttataattctaactactcaggtaaagctccccagaatgtatgggattatctttcacatcattcggaggaaggtgaagcgcattttctgcagataggccctgatatttttccaggtgaaaagaacagaatgtgagaaattggttgagtgtacggggagtagaagattttggatgcacaaagagtgaggccacaaaaatgccagaatcatgttaaaattggaataggactttccagttttaaagcatggtcagataattgttgctaagtaaccaatgatccatcaagttagaggttaaataacctgtaccctgggttgcttaattagtaagaagcagagtcttgtatttcacaaatatgtttatttacactcattgaggccttcttgagtaagtgttgttcactgtactagatttgaagaaccaatatcccatcactaattaacattaaaatgtctgttcttcttcatttgcaacaacctctagaatccttttaatggcaggataaaaagacaatgtttatgcatgtgaccacgtaagaaacccagggccactgataacactgaccccttcaagtgcatgctggggtctattgccatctcggccgccaattttccctcccagttttttgctgtcatcaaaccctggtgacacccagctgcatgtcttcagccctcatctctctcctgagctccagagctgtttatctctagtaataatcattcccaaagtgtggygccccagacccacagcatccgcagaatctgagaacttgtcggaaatgcaaattcctgggctccactcagtcccctgaaatcagaagccgtgcaggtgagatccagcgatctgttgtaatcagccctccagaggactctgatgcatgctacagtttgagaagcactgagccataatggaagccttctgaaaaagattcaggcgaatgttccgttacagcctcaggcctggcataccttgtcttttccttggcatcattgcctcctcgtttctttcctttcaaaactgaaaggacatggccccgacacatgtccctttcccttgattttccccttgccatcatgttactcatcctgtcaacctccacctccagccagttttgtctgccatttctcctgtctccctctttctctctatcttgaccaccactctcctagcttggttctttcttgacattcacctaaaccaatgcggtcactgctggaactcattcttttggcagatacttgctagatgcctaccatatccctggtgctgttctaggtttggagtttggcactgagtgatttctcaggactttcagtggtaaggctggaagagtactgcacaaactgggacagttggacactaagctggggttcaaaatccagcaggtttggtatctgccctcaagtctacagtctaattctagtctacctaatcaaatccacctatcatctaattctcactgatgtctgtgactttagtctttgccattcagacgcattttccacacttctacccgggtggcatagaaccctctctgaattaaaaccccttggcagttcttcattacaaggtagacagtgtgtctcaacttttaccaggttctactgcaataaaagtctccagtcacaatgacttacaacaatacatgtttctctcttgtctgcatggcacgtcagctgcggttgtctggctgtggctgtgcttgatttctcctctgtgttctgagagtcaaggaatcctcctgtctaggacatyccatctttgtggctcagggaaaagaacagtggctgaacttcgaaatggctgtttctgctctgatgtgacaccgtcattttgctcacatcccattggcaaaccaattcacatgtccaagttaaatgggaattggagactgggggaaggagtgtgcttctctaaggaagcattgcaggccacctggtaataggcaggacatccccagggaggagggagcaaattattgggaatcgtcatacattgtctagtagacagtaagatcaaamttctcagccgcagaaatatcagtgggaccaggcgtggtggcttacacctctcagcactttgggaggctgaggcgggcggatcacctgaggtcaggagttcgagaccagcctagccaacatggcgaaaccctgtctctactaaaaatacaaatacaggcgcctgtaatcccagctactcaggaggctgaggcaggagaatcgcttgaacctgggaggcggaagttgcagtgagctgagatcatgccattgcactatagcctgagagacgagtgaaactccgtctcaaaaagaaaaaaaaagaaatatcattggaaccaaggtcttctgcctccatactcagtgactctttcgctgctgatagatgggctgaactgaatgcttctaatgcatgatctggacttgcatggggttcatcatggttcatcaaagaggtagtggagcttcagaattaagacatgaaccagaccagctaggttagaaacctccttctaccaccacttggctgtataacctggggcaagctacttaacctccctggtcctcagtatcctcatttatataatgctgatcattgtatctacctcatacgattatcttgggggttgcattagtcaacacatgtgaaatatttcgaatggcccccagcactagtaagtgcttaataaagatcagctatcattagctcataaggaaaaataattcgtgttcagagttgattagcaaaggcagctgcgcagtcattgtgacttgaataaggtggggaaaatgatctaagagttgagaggaagaactcccacgggagaggtggtacttggtcttgggaccaggtggtgagagaggtgtgggaggtggtacttggtcttgggaccaggtggtgagtgaggtaggagagatggtacttggtctaagcctccttagatggctgtgctctctgccartagcaaagggcatccccaggggagaatttcatgagtggaggcttggccagggccatggtcctaagcctgcctggaagccttggaaaattagtgccatttggcttcagcttatatggtgtgtgcagaagtattggaagcaggtaatggcccagggtatattttattgctcattttaaatagaaagatgagatgagccaacaggtaattcaatagctgcaaatgaaaagagatgggttgtcgactgtgtgttctcattattcttcccgataatgcagaggaatgggattttcgcttgactctgttccaaagcctgcattctgttataagctgggagattaatgccctggcttaggagagccatcttctccttctcgaatatgggaaatgatcccttcccgcgcctgcctcggagacacacgatggtggaggtgtctggccatctgctgtctcctaagccagtcgggctacaccttgaacctggagccagattcctgacgaattacctgctgcagcctcgagctggggaagtgagcaggaagctgggattctgcctgcctttgcatttaattagtttccagtctcctattgctaaccaattcaattagatccctttaagaaatcaattaaatcatcaattaaaacaactgaaataatcacacacacacacacagagaagctagtgaaatgtgtgttaaaaccaggccatccgggcagaagtgacctattttgggaaagggaattcagtgccagcagaaaaaacaagcggtggcagtcagtgccctggggggaaactgacgacactgtataaaactgtcakgcaatgtgaatcatggagtccaccgtcagtatgagaagtgagacttggcactttcttgggaaggagaccccatgttctgaactcctcttgctccaggcttttcgggccagagcaggcatcactctagtgattccaacaaggggaaaggggtgcgctgatttcacacgcttcacagcccaggagtgaagctgcaggatccagcgtgggcaggtccctgggagcctcagtttgcatctgagttccagccttcccaaagcccagccttaagtagctaaatgctgttcattcygtgtggtcttgggaggtgtgcctcacgggagagaagagaggtttcatgtctatttctctatgtttcagggctgagccggttctatcccgcatccaggaaaaccggaagcgtgtgatcctcccctccattgacaacatcaaacaggacaactttgaggtgcagcggtaygagaactcggcccacgggtacagctgggagctgtggtgcatgtacatcagccccccaaaagactggtgggacgccggagacccttctctccccatcaggtctgtggctggtgagccctggcggccaacgagcccccaaattcaagggtaaaaaggagctactgagagaggccaggaaagcctgccttgggctcgagcagctgtgtgcacacagctctccaggagccgcmgttgtctcaggatcacagctttcctgcagagggaggatgttgcattttgcacctttatgtaaagttttcaagtgcagctttccaacrgcgatactgagaagtttcaaactgatagtaaygttcacacttctttattcttcctcgtataggaggaactgcgttcaggagcttttaaggatgaagtttgaaagttattttttctggggctattttatacttgaagccttgtactgttgtcatgtttgcactctttttcatgatacaagatcatatagaaaaggacaagggggtgtggcattctgaggaactggagggatgttggggagctctttatggctcttgcccygggtcccacccagctgcctctcgggatatggagatcaatatcttgaggcataccagttgcagaactcaaatagaaaggaggttgaggccgggcctggtagctcatccctgtaatcccagcactgtgggaggccaaagtgggtggatcacttgaagtcaggagttcgagatcagcctggccaacatggcgaaaccccttctctactaaaatttaaaaaattagatgggcgtggtggcaggtgcctgtaatcccagctacttgggaggctgagacaggagaatcacttgaacctgggaggtggaggttgcagtgagctgagatcatgccattgcactccagcctgggcaacaagagcaaaactctgtctcgaaaaaaaaaaaaaaaagcaaggaggttgaatgaaataggttgatttcaatgctatattagtttcctcttgctgctataacaagttactatgaaaatmatgacttgaaacagcacagattgatgctgctacagttcttgaggtcrgaartttgcaatgagctgatggaactaaaatgaagaaggggttgggtcaggagggctgggtcaggaggtctggtccttctgggggctcttgggagatccatgtccttgscttttccagcttccagaagctgcctcctcccttggctcatggctrtgtcgcatctccctttctctctggcacccttcatcacgtgaccttttcctcctttgcttccttccttcccacttataaaggcttttgtgattacattctgggaccatacaagaatccaggattatctcccatcttgagatccttaacttaacaacatctgcaaagttcttttcctaaataagggaccattcacaagttcctaatctctggaacctgtgaatggtcctttatttgggaaaaagtgaaatgggagtgttcccttatcccctttgcggggcatatgacaggggtgtggcttgcttcttcagtgccccactgctcaaacccctagggggatcatgcagatgggtaggttgcggggagcattttggggctccgaccccatggcggtctccaggattgagtgtttacagctcccgaagccccagtgggcatgtgttacagtgtgctctttcatctttgccatctgcagggagcttgtgttaatcagcttacttagaccctctgccttatcacaaggacagagggctttctgtatcctgggtccttgccctagtgtgtcagaaaaaccagatcacatgtgggcttagagaatgagtgcaaggtgttcctgagtggtggaggtagctctcaatgagatggatggggagcaggaagggggatggagtgggaaggtggtcttcccctggagttgggttgcacagcagccagactctcctycaactacccctggccgaactcccctcagcatccacgtcattctgttgttgctagcctgctggtgtctgctggtgtctgtccatgtgttctgctcctctcaacgtccagccgcttgtgtctgtgcccactgtggtcccgggtttttatgggcacaggatgggggacagggtatggtgggccaaagggcaactttttcagtgcgaaaacagaaatacctgtcctcatttaggtccgtgggcacaggcccgagggtggagcccttgccagggaccctgcccttctctacccagcacttccctgcccctgttgcatatcaaaaggactttgcagatgtgatatggaaatcctaatctctggaacctgtgaatggtaccttatttggggaaaagggcttggttgaaaaccctctgatccccgagttatagttcagtactttatgtgagttctacttgaggaccaaactgactctaaaatcatggttctgtcttaagtagggagaggcaggagaggcctgtgtacctgggctcggttttaggggtgtgcttgttggtgttaagtaagatagcacgatggaataatgaagtagggatgaagactttttacagataatcatgaagttctttctcagtttaaacatttgtgattaacaagagtaaaagtttagccaggcccagtggccctcacctgtaatctcagcacttcgggaggccaaggcaggaggattgcctgagttcaggagtttaaaaccagcctgggcaacatagccagactgtgtctccactgaaataaaattaaaaaaaaaaattagccggggtggtggtgtgctcttgtaatctcagctacccaggaagctgaggaaggagggttgctggagcccaggaggtcgaggctgtagtgggctgtgatcactccwctgcactccagcctgggcaatagaaggagaccctgtcacaaataataataaaaaaagagtaagcttttgaaragttcgttatttttctgctgacaccaaaagctgaaaaatagcctttgagtagagcatgggcaaatttgtacagcagagaaggtaatcttttgggtctacaacttcctcaagctgtcttgtggctcagctcccacaccaactgttcatcatgcagtgtttcaggaccatattcttggctatctgcaaataatattaatagtgtaaggttaactaaatctaagccttcagggatatttgagctttaatggcgagtgcttgaagacatgttgaccttcagatctcaaagggatgaaactcaaatgatggactgacagacagtgagtttcatgtgttggctgaaagatactttctcccaagtcttcacactgatacacgggagactggcctccagccaggacagataacagtatgagggtgtcaccgtaagtgctgtcaacagagaaaaagaagtgcttgcagtggagtgccttcggatgcccagcaaacatctgtaatgattgtctctgggtgtgtaaggttctaagcaaaaagttagcttgtatttcataagttacrgtaatattaacagatgattaatatgcactttaaaaagactcaagaaagtagagtcatgatcatgagtcattaatgtgacatgcayctctgttgtacaaaatagaatcaaatgccaatgatgtctttttaatgtgtcttaacttacggaatgcttaatttgttaatagttgatggggatatttaattgcagggatgaatttttatggwccttctgaaattattaagcggatacaatatgctttcttaaacatgaggacatggcagtttctctttcttgctgtgaagccaacattttaatagtacgattttgctccagtaaaagatgggccaaagaaaacatttcatcatccaaatggtgttagattagatgagtctttagatactgagacttcccggtaagcaacataatataggagatttgcattaagggaattgataattccttctgtttcagttcttttcctgtttctttctatatattaatattttttttgtcctgcctgctaaatagctgttttctcaggttttctctttgtcctccactyttatttttccacaccagagtttccagtatagcaagtgggcaagtgccattaaasagggcaaaggccgattgtaagggtaagaggtgggggaactgaagaacacaggtcctgcccaaggaggcagctgttcccagctctgcttggtggtgccagtgtggtcaggtcttcagaatttttttttttttttgagacaaagtctagctctgtcgcccaggctgagtgcaggggagcgatctcggctcgctgcaacctctgcctcccgggttcgagcaattcttctgcttcagcctcctgagtatctgcgactacaggtgcatgccaccacgcccagctaattttttgtatttttagtagagacagggtttcaccatgttgaccaggctggtcttgaactcctgacctcgtgatccacccgtctcagcctcccaaagtgctaggattacaggcgtgagccactgcgcctggcccagaattttaagagaagccataaatctagagcctttgtgaaatctcctgccttctaaatgttgacaataaacctctcttcttcaaaacttcaaggccccaaccacatgcgtctagactgcatttgaccacccggcccccagaacttgatcttgcctttacactcaactccttggagacctgtgttgttcccaggatagctttcatttatgcaacttacaccggcagtgggcacctgtggwatgtattgtgggtgccatggaggatgtattagttcttgccctgctgtaaagaaatacctgagactgggtaatttataaagaaaggaggtttcattggcttaggattcagcaggctgtactggaagcatggaggcttctgcgtctggggaggcctcaggaatcttacagtcatggcagaaggggaagcaggcacgtattacatggccagagtaggaggaagaagagagaaggagaaggtgccacacacttgtaaacaaccagatctcttgagaactctatcatgagaacagcaccaaagggatggtgctaatgcattcatgaaggatccaccctcatgatccaatcacctcccaccaggccccacctccaacactagggattacaattcaacatgagatttgggcgggggtgcagagccaaaccacgtcagtggggctgggggatttggggaaagtgtcactcaaagccacaggagcaacatggccagacttccttgaactccagttcaacctgtagagattcccctcatgttgtattattgtgtgtccacagccctctctgctgaggttcgtctatgtaagactttgtgcagcactgacccagctcttgcctctgtgtagagaagcttcttaaatctgctgtcttaagctctgattgttctccaagagcaacttcctttctgttaggcggttcttgaattgctacaaagaaatgcctgaggctgagtaatttataaaggaaagaggtttcattggctcacagttctgcaggctgtacaaacctggcactggcatcttggcttttgaggaggcctcatagagcttttactcatggcagaaggtgaagtgggagctgacacatctcacggcaaagcaggaagaagaggcggtggctcacacctttaatcccagcactttgggaggccgaggtgggctgataactgaggtcaggagttcaagaccagcctagccaacatggataaaccctgtctctactaaaaatacaaaaattagctgggcatggtgatgcacacctgtaatcccagctactcgggaggatgaggcaggagaatcacctgaacttggaggcggaggttgcagtgagccaagatcataccacctgcactccagcctggctgacagagcaagactccagactccgtctcaaaaaaaaagatattggctagttagaaagacaagcgtgttcttcataggaagttataccatcaatccatattaataatgataatataccaattattattagatttaccgtttattgaatgcatattgaggactttatatatagcttttcatttactcttttttttttttttgagatggagtcttgctctgtcacccaggctggagtgcagtggcatgatcttggctcactgcaacctccacctcccaggttgaagcgattctcttgcctcagcctaccaagtagctgggactacaggtgcgtgcctccacacctggcttttatttttattttaatttttttttgtatttttagtagagacgaggttttaccgtgttaaccaggttggtstcaatctcctgacctcgtgatctgcctgcctcagccccctaaagtgctgggattacaggtgtgagccaccaccacgcctggcctcatttactcttaacagtcagaagcctagtaccaaatgattcggcagtatcctttttttgttttcaatgtccacaccacattggggtgtaggaaatctgaacctccaggttgcttttttgaccccatgcaggcagtgactcccttcagctggcctctcctagggtactctcgacttctgccttcttgtttgccccatgtactcttattgctggagtctccatgctctggtaagccactgtccagggcagtggtcctcaacccctgagttgcggaccagggctggtcctggtccatggccttttaggaactgagcctcacagcaggaggtgagtggcaggcgagcgagcaagcaaagcttcatctgtatttacagcctcttgccatctcccacattccctcctgagctcggcttctcatcagatcagcaggggcattcgattctcataggagcacaaatcctattgtgaattgcgcgtgtgaaggatgtaggttacgtgttgcttatgagataatctaatgcctgatcatctgaggtagaacagtttcatcctgaaaccatccccacccaccacccttgtccatggaaaaattgtcttccatgaaaccagtccctggtgctgaaaaggttggggactgctgatctagagcatcccttttggttttgtttatgatgttcttaatcgtggcaatatatatgtaacataaattttaccattttatccattgtaaagtgtgaagttcagtggcaataagaacattcccagtgttgtgcaactatctccacgatctacttccagttttcttattcccccaaatagygacccagtgcccattaagcagtcacttcctattcctccctcccaccaaacagtgaaggctgccaatctactttctgtctctatggatttgcctattttggacatttcatataagtggagtcctgcagaatgtggctttttgtttctggcttcttttattagcatacagtttatgaggttcattcatgcatcagaaatccattgcttttcttggtggacatcccttttattattttttttgagacagaatctctccytgtcacccaagctggaatgcagtggtgtgatcttggctaactgcaacctctgcctctgggttcaagcaattcttctgcctcagcttcccgagtagctgggactacaggcatgcaccaccatgcccagctaatttttgtatttttagtagagacgaggtttcaccatgttggccaggatggtctcgatctcttgacctcgtgatctgcccacctcggcctcccaaagtgctgggattacaggcatgagccactgcgcccggctgacatcgtttttaaagtggttccaagtccacattccttctgcaggttccatatctggtttctgggatttgcacacctttgtccctcttgggtggaaagacggcttccctgaccagggctcccctgtgttccagagggcacgttccctttcgtaagtgtgagtcgcacaccagtgagcatgtgtctccacttccagggacaccggccactaggcttggggttagatggtaggactctcgtccctcccttcaggtacagtttgcttctgggaaaccctcctgacaccttcttttcctggactccacttacttatccaaagtattcggctaatctgtttgtctgtctattgaaatttttgcaagatctcttttaatacagcatctattgtcagaatgtcttcagccccagtgtggacacgaagagccctgttttaacacagtacatacatctgaaggcatggaacagggaraaggggaaagtctgaaggcagaaaggaaggggtggggactgattgggaaagaaagaccctgaagaaggaggcgtgggtgggctaaggacatgaacaatggtttggtcttgaatggtaggaagggaaaggtcatgctgtctgactcacattttccttgtgaatgaggagagaaaatcatttgttaagagtgagagctgggcctcagataggaggctacccaaaaggggtaaaagtctggaatcattgctgaaagttcaccaagaacagaaaaaataatggctatttcaaggtgcaaagaatataaattcaacaaaatttccaccaggatttctttttcttagttatttatatttttagagataagatctcactctgttgcccaggctagagtgcagtggtgagatcatagttcatcatggcctccaactcctgggctcaagcgatactcctgcctcagcctccagcggagctgggaccacaggcatgtgccaccatgcacaggtaatttttaaattttttcttgagacagtctcactctgtctcccaggctggagtgcagtggcaccatctcagctcattgcaatctccacctcctgggttcaagcgattctcctactgcagcctcccaagtagccgggattaccagtgcccaccaccacacccagctaattgttgtacttttagtagagataaggttttatcatgttggcaagactggtctcaaactcctgacctcaagtgatctgcccgcctcagccttccagagtgctgggattacatacgtgagccaccgtgcctggctgtaatttttaaaaaatgtttgtaaagtcaggggtcttgctatgttgcccaggctggtcttgatctcctggcctcaagcaatcctcttcccttattctcccaaagcactgggattatgagcaagagccactgcacctgaccccaccaggatttcttgacaaaaaaaactaccataaattcagttgtgttttgttatgaactcagattttgttattcatgacattatgtatatatggggaaaagagtgaggtgtaagataagaatgaaggataccatttatttagcctgaatgcacctaggttaggtgcaccataagttcatgaaaacctggcttagttctgctgccttcagagaacttttgctcgtagcttgagaactgctgatctgtacacttctctccagctgcaaaagcctgagactttcaccatgagagggaaggttccaaaatgccacagatgggacattttacagcatatgttgctttcagggcactggctgaaagctgagtcaggcatcttctgtgaggtgacagtggttcctccctgctgtatgttaggtggtcctataattagtgacattgctcatgaataactaattaaaggcaatgattaacaatttagcaatccytaatccaacatataatttgataataaattataaggtatgggtgctgttagagcctgttagactcctttagttgaaagggatgccttggatatatagttgccgggatctcaaattctgtgcacagatatgtacaaagggagaaggttattttttcctccctaaaggaatatgactggcttacagaggaggaaagctttaagagaagaaatcagactttaaaatagaggtatctttcctatgcatcagcaaatatattttaggggccaattgtgtgctcagctttggggtaagcatttccagcagggatagtattggtaaatgaaatgattatcctgtcttgatggagttcatgggtggtgacacaggctttcaaatgtgtgtgatagcacttcagggcaatgaaatgtggaatcatgggagggagggaatttttgccattggagtggatggaaaagctcatagccataactaacaccacagtgttctatgtgtcaggtacagttcttgtatttagcacaatacacatctattcgctcctcattctcaccctatgagtatttttttttcttttctttcttttttttttttttttttttgagacagagtcttgccctgtcacccaggctgggtgtagtggtgtgatctcaactcactgcaacctccacctcccgggttcaagtgattctcccgcctcagcctcctgagtagctgggactacaggcatgcaccaccacagctggctaatttttgtacatttaatagagatgggttttgccatgttggtcaggttggtctcaaactcctaacctcaagtgatacaccctcctcagcctcccaaagtgctgggattacaggtgggagccaccgtacctggccaagatgaatattattatatcctttttacaggcaaagttgctgaagcatgagttaagcaccttacccaacgtcacacacctggtaagaagtggagctgggattcggatgtagtcaggcccagagtctgtgttcttacctgctgttctgtctttcctggaaaagatttgactagctggaccttgccagctggaggakatttttaccggctgagtatatgcaagataacacaatgcagggtatagttctgcaaatgagtgtgtttggggtcttaaagcccactgtcatgtttcatgattcaccaggagaactctcgaaactcagaaaagctgtacaatcatggttattatttgttaatgatgaaaagatacagattaaaatcaacaggctgggcatggtggctcacacctataatcccagcactttgggaggccaaggcaggtggatcacctgaggtcaggaattcaagaccagcctgcccaacatagtgaaactgtgtctctactaaaaatacaaaaagtagctgggtgtgatggtgcacacctgtaattccagctactcgggaagctgaggcaggataatcacttgaacatgggacgcggaggttgcagtgagccgagatcacgccattgcactccagcctgggcaacagagcaagactccgtctcaaaaaaaaaaaatctgcagagatgcatgaagagtcccacagaagtcagttgcaagcttccacttgtcctctcccaaatggagttgtatgggtagggctgatttgctccgcggtggcacataacaactcatttcaagtcctgccaatcaggaagctcacctgagccttggcatcccgggtttttactgtgggtcagtcacatagrcatggagagccttgcatgactctccttagctactcaacctccagcccttgcccaccagaagttaaactgcagtagcatcgtccagggccttggcatgcaaagacactcttatcaggtaggatattccaagggcttagagattgtctcccagaagctgatccagggccagttctttctctggattgtgcggggtttagacaacccaagcccactgagttaaccctttactacataatgaagatgagttgtttagtgtcttatgaagatactgaaggtgggaaatatgcattaaaaaacagaagaaagaggttgagtgcgatggctctggtctgtaatcttagcactttgggaggccaaggcaggaagatcacttgaagccaggagttcaaggccagcttggacaacacagtgagatcccatctgtatttctttttgttgttgttgttgtccagacagagtctcactccatcacccaggcgggagtgcagtggcttgatctcgactcactgcaacctccaccttctgggttcaagcgattattgtacctcagcttcctgagtagctggaataacaggcatgcaccaccacacctggctaattttttgtatttttagtagagacagggtttcaccatgttggccaggctggtctccacacctcaggtgatctgcccaccttggcctcccaaagtgctgggattacaggagtcagccactgtgcctggccccatctctattctttaaaaatataaagtaaaaatagaggaaagatggaagactatccggtcttcatctggaagtcgtcatcttccagataaaaacaggaggtatgctgtatagagggctctaaaaaccaaacagcagagcccagactcaccccactagtctggtgagtctaactaaagatgaataaaaaaccaaccaggggagacagaaagtagaatagtgcttacccactactaggggtcacccccatctgtggaggagggatggatagaggagtgactgataatgaagatggggctttggggtagaagtgatgaaaatgttccaaaattggtttttgtgacattgcataacwctatgactatactaaaaaccattggcttgtacacagcaagcaggtgaattatgtggtccgtgaattctttctcagaagctgatggctatcggatgaccagtccttcaacaagatgaagacagattgagtatcaattattggtycacaatggcctggaacgtttctctctggttaaccctgagattttgcctgtcccttcttttgtcagagcagcacagagtacagcaggtgatccaatcggggtcaaattttaaaccagcagaactggtcatggtagagtcctgagtgggaatttagaaaccaagtctgatggttaatactgggtgtcaacttgattggattgaaggatacaaagtattgtttctgcatgtatttatgagggtattgtcaaaggagattaacatttgagtcactggactgggagaggcagacccaccctcaatctgtttgggcaccatctaatcagctgccagcgtggctaggataaaagcaggcagaggaatgtggaaggactagattggctgagtcttctggcctccatctttttcctgtgccaaatgcttcctgcccttgaacatcagactccaatttcttcagcttttggactcttgggcttacaccagtgaattgccaggggctcttggaccttctgccacagattgaaggctgcactgtcaacttccctactttagaggttttgggattcagacaggttkctttactcctcagcttgcagacggcttattgcgggacttcaccttgtgatcatgtgagtcaattctccttaataaactcccctttatatatacatctatcttatgagtcctgtccctctagagaaccctcactaatacaccaaggaacatccttggtgaaggtttagcatcacacaggaccagaccagctgaggctgctgacctccctgggcctggtagagaatcctggtcaattgcagygtgttgtgggtaaggtcaggttgaagactggtacttttccttggtctagcaaaggagagttcgtaaagcaatccagccaggggccaagtgaatgctggcacatttcaggaagagaaaagtcacagtgaagaagatagacattctccacctttctttttttccctgtcctgctagtcttccaataacagagaaatggcctgttcacttttgccacccgtgggttctgtgtycttaggcagatcactcacttgttgtgtaaatgagcttttaattttcttgtccttaaaacttcaccagcattgaaatgtcgattgttccactagtagaaaattgccgtaacaaaacttttggtcccttagatgaaaagcactaattataaactctctggagttgtggcatgggctgttgtagataattaatgtttcagttaatagaatkctactacagaagcaagacatggagagatagatggtaaaaaacaaacaaacaaacaaaaaccctccacaaaattctgtttgctttcttcaggggaccagtctggagaaggctggttgacagagggtgttgcttccattgagggaattcacatcacactagaagaggcattattataaaatattactcaggaatatggacagatgcagtgggtcatgcctataatcccagcattttgggaggctgaagtgggaggattgttgagaccaggagttcaagaccagcctgggcatcmtagcaagaccccatctctacagaaaaatttttaaaattagatggatgtggtggtgcgtgcctgaaactgcctttgcaaaattatgactgagacggtgaaaaagatctaacctaagtgactccatcttccttctaacctttaacctgtccttgttccttctgggtcataggctgaattagcttagggaggaacttagtttatagtttaaaacaaagatgataacagccctttcccaaaacaaacctcctcttgcctggggactagaccgcctttgtaggactaacaaattagccataacattagaaattatggtttaggagtcatgcagctggaggctacaagcttctgaccctccctaaaccacttcctaagatcagtgcttgagatattttgcagaccctgcacttgatggatcagctggtgccacccagatctataaactagttcatctgatcttcgggcccccacccaggaactgactcagcgcaagaggacggcatcaattccctatgatttcatctccgacccaaccaatcaacactctcaactcactggccttcccccaccgaagttgctctaaaaaactctgatccccagccaggcgcaatggctcacgcctgtaatcccagcactttgggaggccgagaccggtggatcacggggtcaggagatcaagatcatcctggctaacacagtgaaaccccatctctactaaaaatacaaaataattagcagggcgtggtggcggacgcctgtagtcccacctactcgggaggctgaggcaggagaatggcgtgaacctgggaggtggagcttgcagtgagccaagatcacgctactgcactccagcctgggttacagaacgagactccttctcaaaaaaaagaaaaaaaaaaaaaaacaactctgatccccgaatgctcagggagactgatttgagtaataataaaactcgggtctcccagacagctggctctggtgcgaattactctttctctgttgcaattcccctgtcttgataaatcagctctgtctaggcagcaggcaagatgaacccaccgggtggttacatggctgtagtctcggacactcaggaggctgagatgagaggattgcttaagctcaagagttggaggctgcagtgagctgtaatcattccactgcacaccagccttggcaactgagtgaaaccctgtctctaaaagaaaatgaaatgaaataaaatttaaaaataaacttgttctatggaggacactcttattgtatgtcagtcctctttaaaaatgtatccatgttggctgggcacggtgactcacgcctgtaatcccagcactttgggaggccgaggcaggcagatcacgaggtcaagagattgagaccatcctggctaacatggtgaaaccctgtctttactaaaaatacaaaaaattagtcagggatcgtggcgggcgcctgtagtcccagctactcaggaggctaaggcaggagaatggtgtgaacccgggaggcagagcttgcagtgagctgagatcgcaccactgcactccagcctgggcgacagagcgagactccatctcaaaaaaaaaaaaataaataaaacaaaaataaatgtatccatgtttccacactttcgagaccccaaatgcaaactctgaatgaaaacaactgctagagaaacagtgtgagtttgactgtctgtaagatggtctaatggaaggcatatccatttctctgcgggggtccatcctgcagaccctgacccaacaatggatgaataacgtacactgacacagatattctgcttatcagtccagctgagcatctgggctcctcacagacaccaaggaagatgtgtgaagagtcagcagccacatcttcgactcgctggccctcccggcatttattcagcacacattaaatgacagaggtcttaagtaaacaccactagaaggtaattaccgttgctgacccccctgagtagagagcaatcatgcaaccacggatggtcaaaggttagtcttaggaccacatgagtaaacaagctatttagataaactactctgcatccttttgtatctgcaccctaagctctctggctcctgaaaagagaatctggctgccttcagccaaactacctaaagttatgcaaaactccccagccttccaagatttgcttttttctattcctgtgattttacaatttctcccaccatcctgactgaatccccatatttctttaaaacatttgctatttgttcaaacaatcagctgggaagaatgcctacgaaccatcacagttgatcaggtccctaaaggagcatcatgatcaactttatcactttctgggaaagtaggtacagttcacaaggtgacacgggatatcactccctagttggtcggctctgcgtggccgtccacagctgactgctgccttcccacagggctcaacgaatatgtaacttcacagatgaggacaagtgattcttcagtgacttcaaatgtcagcagcatgatgtgatagaacatctcccaggttctggagcctgtttcagtttttgttgttgtttttgtttgtttgttttaaattttttgagacagggtctcactctgccacccaggctagagtgcagtggtgcaatcatagctcactgtaaccttgaactcctaggctcaagcaatcttcccaccttagttgcccaagtagctgggactacaggtgcatgccatgcccagctaattatttttattttttgtagaagtagggtcttgctatgttgtccaggctggtctcaaactcctggtttcaagcattcctcgtgccttggcctcccaaagtgctgggattacaggcatgagccactgcacttggcaaagagacctgttttctaagccagatttgaaccacaaattttgatattcagtttacttccctgtaaaatggtggatttggactatgtgatattagtcagggttctctagagggacagaactaataatatatgtatgtatgtatgtatatgggtttaataagtattaactcacaagatgacaaggtcccacaataggctgtctgcaagctggggagcaaggaagccagtccaagttccaaaactgaagaatttgcagtccaatgtttgagggcaggaagcatccagcatgggagaaagatgcagtctgggaggctaagctagtctagtcatttcacgtttttctgcctgctttatattctagccatgctggttagtgccyacccagattaagggtgagtctgcctttcccagcccactgactcaaatgttagtctcctttggcaacaccttggcagacacacccaggatcaatactttgcatccttcaatccaatcaagttgacactcagtattaatcatcacagatgcattggatgagatgtcttcagattcttcatctgtaaaggggataataatagtactgtcttatagggttgttgtgaagattaaatgagataatacatgtaaaatgcttaaaacagtccatggcacatagtaagtgctctagaaataacagctgttcttgctatcaatattattagagcaattctctattctacaatgctcctcactttgggaatattataatagcccttttctttttatttggtctaggtcatacaaccaaatagttataacaaataacctgatcattggattatcactaatttatgtcctacacatgacagactctggtcgctaataaaagatagacttttttttttttttttggagacaaggtcttgttttgtggcccaggctggagtgcagtgatgtgatcatagctcactgtagccttgacctcccaggctcaagggatcctcccacctcagcctcccatgtagctgggaccacaggcatgcaccaccaccatgcctggctaattttttaaaattgtttgtagagatgagtcttgctatgttgccctggctggcctcaaactcctggcctcaagtgatcctcccacctcggcctcccaaagtgctgggattactttgccaggggtgaaccactgcgcccagccaggccaggagagacattttaaatgccaagggatttgcacagaaaagaagggactcatgttcttgaagccactctcttcagaaagctattccttatgaaatgggagtgcacttacagaatggtgaacaccttgcttttgggtgaaatacatgctatttcttgacatcacctaggtaccttctgcaccagcctgggtagatcaatatttctttttgcgtgacacgctgatattgctgctagatagctttcctttggaagcaaaattcccaggcagtgccctagagctggagcaacattagcaacgtaaactttctctgcgatgacaagcagagaggcctgcctccatcaaccgacatgcactgtgacagctcccagcggcaggyagattaatctgaataatgtcagaatgacttttctcctcccttgtaaagaggttcagtgttgcgggctgccaaggagcagacacattttattttaaatttaaggatttttaaaaatggaggacactttacctctgaattaaatgctcagttcctgagttattgctggacataaatagggaagcagccatcccattaattttatggagctgatctgtggggagagagtaataggcttcatattctccttctgttggtgctagatgtagactatagtgaggggtggaaaggggtaggctccagctcttattttggtagctttaatccccctttctagatggttccagagtgtttcatcttccaggccctcttttttttttttttttttttgagacagaatttcactctgtcacccaggctggaatacagtggcacaatcttggctcattgcagcctcgcttcctgggttcaagcaattttcctgccttagcctcccgagcatgcgccaccacgcctggctaatttttcgtatttttagtaggggcaggatttcaccatgttggccagactggtctcgaactcctgacctcgagtgatccatcttttcaggccctcttacatatctttcttcttctgccctttctttttattcctttttccactgtatcctgaaaggctgaaaagtaactgcagaagactctgaaattcagttcagggcagaaaataacctttcttccttgctcccccacgacctctgatggtttttttctacagcacagttcagaactctttctttcttaatttttttttttttttttgagatggagtttccctctgttgcccaggctagagtgcaatggcacgatctcagctcactgcgacctccgaatcctgggttcaaccaattctcctgcctcagcctcccaagtagctgggattacaggcatgtgccaccatgcgcggttaactttgtatttttagtagagatggggtttcaccatgttggtcaggctggtcttgaactcccgacctcaggtaatctgcccacctcggcctcccaaagtgctgggaatacaggtgtgagccaccgcgcctggccagttcagaactgttttcttgtctcctggcccttctggtcctccacgaattattatttcttagttgtttccagggggtcctttagaaaagaaaacgaagattatcacttgttctcaaacccaaacagccttttttgtttacctagtctctccagtagcacttgctggagttttcatcctccgaggtgtggcaatgagtaacttctcatcaggccttaccagtcatgcaaggtgtgttacgtttgaggccatccatttctcctcttgtttatggaaatacaggaacatatgactgtttcatgtcttgtgcgttggagagaaagcatatcagtttttttgttgttgttctttttttttttggtttttttttggagatggattcttgctcttccgccaggctgcagtgcagtggcgcgatcttggctcactgcaacctccgcctcctgggttcaagttgttctcctgcctcagcctcacaagtagctgggactataggcgcccgccaccacgcccggctgatttttgtatttttagtagagacagggtttcatcatgttggccagtctgatctctatctcttgacctcgtaatccacccaccttggcctcccataccaaattttatttgagattgggaagtcaatcatgagtaccgatatcagagcctgcagagccttctcttccaaccaatgaactatctgcagtacagcatacacaaatgaccatttgtggttaaccacccggacaccatttccatttttcatcctgttgaccctccacagttttttttctttttctttttctttttttaattttactttaagttctgggatacatttgcagaacgtgcaggtttgttaacacaggtatacatgtgccatggtggtttgctgcacctatcaaccggtcatctaggttttaagccctgcatgcattaggtatttgtcctaatgctctccctcccttcgcccctcacctactgacatgtccccgtgtgtgatgttcccctccctgtgtccatgtgttctcattggtcaactcccacttatgagtgagaacatgcagtgtttggttttctgttcctgtgtttgctgagaagcatggtttccagctacatccatgtccctgcaraggacatgaactcattctttttaatggctgcatagtattccatggtgtgtatgtgccacattttctttatccagtttatcattgatgggcatttgggttggttccaagtctttgctattgtaaatagtgctgcaataaacgtatgtgtgtgtgtgtgtctttatagtagaatgatgtataatcctttgggtatatgcccagtaatgggattgctgggtcaaatggtatttctggttctagatcctggaggaatcgccacactgtcttccacaatggttgaactgatttacagtcccaccaacaatgtaaaagtgttcctatttctccccaacctcatcagcaagttatttttttgactttttcataatagccattcaagcctgcagaagtgttttttttgttttgttttgttttgagatggagtctcactctgtcacccaggctggagtgcaatggcccgatctcagctcactgcaagctctgcctgccgggtttacgccattctcctgcctcagcctcctgagtagctgggactacgggcgcccgccaccatgcccggctaatttttttgtatttttttagtagagatggggtttcaccgtgttagccaggatggtctcaatctcctgacctcatgatctgcctgcctcggcctcccaaagtgctgggattacaggcgtgagccaccggcctgcagaagttttaagcagactttcccaaagtctgaaaattgggttggtactttgcaatatctttttggagtgttgggtcacagtctttccttttttggctgccaacatgactctaaaaatagcttctgctaccaggcacgcagagagtcaggggtaattgacttcattttcttccggaagtgtaggctcctgtgtcattaagtcattctggtagtacatccttacagcagcagagaggttgcaacaagcttgcttaactgttgtgaataacataactaccagtcacgcttgataaagcagtggccccttcaaagccctccgaaaacaggcagtgtgtgagacccgggagagctggcctgcatgggaggtcctttatacacttggtaggatgccccagtcagtattttggagtttaacttcygtgcatgaagttcaatggactcccaggctcttaagaacttcarcttaaaggaaagaggagagaaatgtttcttgagtgtcttttatgaacattgaatttccgactgtggtttctgtggcggctgcaggaggtttcagctggtggcatgagcccttcccatgctataagcaactctgaagtttcagttgcatggacagggtctgagaatgactcagggcaggttacagctcttcattttcgaggtcagcttcgtcgccaattcaaattcaggttattctagttgaatactgggtctctgcaacttctcagttctttgcctcctgccccattccttctctaggatggcttctgggtacgtggggagagggagggtttattttgtgatcaaggggaagcatgacggtctttacacgcactgtttctctgtagagttaggatatttgtcgcytccgaatctcatgctgaaatttgatccgcagtgttggaggtgggcctggagggaggtgtttgggtcatggggacagacccctcatgaatggcttggtgccctcctcctggtaataagtgagttcttgctctattagttcatcttagagctggttgtttaaaagagcatggcactttccttctctctctcctgctccccttatttctccacgtgatgcctgccccatcctccaccttctgccatgagtggaagctgcctcaggccctcaccaggagcagatactgatgccatgcttcttgtacagcttgcaaaaccatgagccagataaacctctattcttcataaattacctagtctgaggtgttcctttttttttttttgagatagagtttcgctcttgttgcccaggctggagtgcagtggcatgatcttggctcactgcaacctccacctcctgcgttgaagtcattcttctgcctcagcttcccgagtggctgggactacaggcgcctgccaccacccctcgctaattgttttgtattttcagtagagacggggtttcaccatgttggccaggctggtctcgaacttttgacctcgggtgatctgcccgccttggcctcccaaagtgctggaattacaggtgtgaggcaccccgctcggcctgaattgttcctttatagcaacacaaaatggactaagacatcctcttgccctctgggcagtgtccctggcctggctggccactccttgccctgctggcattcccagaagacatctgccatgggcctaacttgggatctgacctctcagcttcctcagggcccatctgacccagatctctatggctcatgctggctgcaaacacctgagccttggccacattcccctacccatcccagccccagctgcaggcttcattcctgcccagggaaaagccatcaacaactcttctgccttccctcgccacttcccctttccttcctatgagaaccaagcagaggggctaatgtacgtggcctcctgccatgtggccacactaaaccatcaggttcatgagggtgggcttaggaggatatagacacctgcaggcagcttcatgacacacccrccgtggaaaacaggggtgtcttccgtagcaaactcactatccaacacatctctccctctctgggccaaaatgttaactgagggccgggtgcagtggctcacgcctgtaatcccagcactctgggaggccgaggcaggtagatcacttgaggttaggagttccagaccaacctggccaacatggtgaaactctgtctttactaaaaatacaaaaattgactgggcagcgcctgtaatcccagctactcaggaggctgaggcaagagaatcacttgaatccgggaggtggaggctgcagtgaggcgagatggtgtcactgcactctagcctgggccagcgagactctgtctcaaggaaaacaaacaaacaaacaaacgaaatgttacctgaaaaaaactggagttcatttgcctgaggattaacaaatgactctccaggagaacgcaggctttgatcagtaggtgttttattactcatcacaagtaaggacagcactgggaatattctccaaagcggtgtctctggagggaaagtgacaggagggttttatgggggaatggagaggggagagggtgcatcagcacatgtagaggaggggtctcagtggtgcagatgcggagagccatcatgccatcacccagtcacatgggatggtaatggagctatagcacctcccagggtggagccacctttttttttctttctttctttttttttttttttttgagacagattctcactccgtcacccaggctggagtgcagtggcacaatctcagctcactgcaacctccacctcccaggttcaagcgattctcctgcctcagcctctcgagcagctgggattacaggtgctcaccaccacgcccggctaatttttgtatttttgtttgttttttttttttaagtgtagatggggttttgccatgttggccaggctggtctcgaactcctgacctcaggtgattcacccaccttggcctcccaaagtgctgggattacacgtgtgagccactgcgcccggccagggtggaggcttcaacatggtcatgaggaaggttcattcaggttcatctctaagttgctggggtctgtcaggagctggttccagacaactaggtaaccacattttgcacagggcttgggaagaaacaggctgcaaggtaggagrctgtaaaataggctgattgctgaaatcgattaaattcttataattcctggagactggagactgtccctttctgcttccagaaacatgtcatctcttacctctcccagctccctggaccttctttgcttcccacaggaccttgggcgggaagctgggctttcccctggagtgctccttaatgcctctgcacactcagctttagctgtgatgacaggagagagtcctaagtgatccgcctaccttggcctcccaaagtgctggtattacaagtgtgagccactgccttatagtattttcttaaaagtaactttattcagggggaaaaaaatcccctaaatcttgtagtcgtttctgagaaacgggaatattttcttgaagaagcttgaaattgcagaggcttaaatcttaaattatatgaggagggaggagcagaggctggcagccatgaaattagagctccataatttgtctacagccattcaagaggggaagaaatcagaatgattttctgctctgcttccaatccagatgttgtcttccagcccagtagagaagaacaagaccagagcctaggagaccaatcactttaaaaattatagtgtaaaaatactttttttattatgtattcattataaaatttatactgtatccattataaatttaatattcactgtaaaaatcaaaaatacaaaagatcattagataatcactgataatcataacacccaacgataaccataaccaatgttaatatttcatgagtagctttaatatttcacattattttttactcctacaaataatgtaaaatttatattttcatataaacattttgtatgtacatgtttaaaagtcaaatatatattctacaaggctctacctactctttagaggtaccactttatttatttacttatttattttgaggtggagttttgctctagtcgcccaggctggagtgcaatggcatgatctyggctcactgcaacctctgcctcctgggttcaagtgattcttctgcttcgacctccagagtagctgggattacaggcatgtgccaccatgctcagctaatttttgtatttttagtagagacagggtttcaccacattggccaggctggtctcgaactcctgacctcaagtgatctgtctgcctctgcctcccagagtgctgggattacaggcatgaaccactgcggccgactctattcttttaaatatgccttttgtttacctctrtatctctaaatagtacactttagtcctacatcatgcattttgagatgtgggcattacttcttgactttgactatgggagacaaggtattaactgttattcactcacccgcatccacctctcccgcaaattcacacactactcattcctttgctgagggcttttcccgccacaccagccaaatcttcagttctctgattctcaacactgggtttcctacaattcaattcaattatgacactgattacccagagtaagcattcgaatccacaggtttaagggctcagtcccaaagactgctcccactttaggcactagtcataaatatcaggtctccaggctatccatatttttgtccaacatggctacaaatttggggtttcccaccacctcccttcaggtttgatgatttgctagaatgaatcacagagctcaagaaaacactgcgtactgttacaggttgagcatcctaaattggaaaatctggaattcaaaatgccccaaaatccaactttttgagtgtccacataatgctcaaaggataatgcttattgggaagtattttgcattttctgacatagaatgctcagttggtaagtataatgcaaataatctaaaatcaaaaaaaaaatctgagatttgcaacatgggtctcaagtgttttggttaagggatacttgacctacaccagttcataataaaagatgcaaccccagaatagctgaatggaagaaatgtgtgcccactcttacaccacttattaatacttatattattataactatttgcatctgatccacatggtatactttggttatttttcccttccctgcacagctttttgtttttcctgtatttaaccattgcctttctgtttgtttccttaatttgttttctatatacygttaactaattcagctacatgctttctaccacttgtctgaattccctctcagtcctctcagcaaccttagatattctgtctgctttattttcatgaagagagctccccagggtgctatggcctcatccatcaggactggctgccctctagcagtgatcctgggattcctttcacttctcttctgtgtcccggatctcatgcctttatcttttttagcttattctctcattttattggtgcatatcttcaaataactatttttagtgcttgtatgtgtaaaaatgtctggattctgccttccactttgaatgaccttggcttagaatttgaagacaatattccattgtcttcttacttccaacatggctattggagagttcagagacattctgactcctagttctttcaatgtaacttgtctctttctcttttgaaattcttttattctgggtgctctgaaatttggtgatgctgtgttttggagtatatttctttttattcattgcactggcactcaatagaactttccatttgaaatgtgtgtgcattgttgatatccttacttcgtgtgtatgtgtgtgtgtgtgtgtgtgtggtctctatttttggaactctttttgtttttgtttgggtgttgaaccatccttgtggactgtttctttgtttttctttaatctctgatttttcatcttttatcttttgtctgtatttctggggtattttcttaactttgtttttctaaattttctgtttctgcttttacatttttaattttcaagggttctttttggttctttatcgatcttttgccataacactcagtacttgttttatcaatgcaatatcctttctaattatctgagactgtgaatgtcattttttcttgaaaacaaaaggcatgtatatcttgcaaacataatgttgaatcagagaatacaggcgcaaaaggatgcattactatttgattctttttatataaatttcaattccaaactcatcaagttgtatacattaactatgtatggatttttgtgtatgaatcataccttaataaatagtttaaaaataaataaattataaagccaagaaaaatttagctgttattggaagtcaggtagccagtgggggtaatgactgggagagtgcatagaagggatttctaggacactggttatcttctatttcttgacttgggtgatggtttaaacggatggattccatttgttaaagttgacagctgaacttctgaaacttgtgtacttctctatgtgtttgctctacttcagtgaaaagttttaattagaaataacagctgcctattttcttttttttttttttttttttttttttttgaggcagagtctcgctctgtctcccaggctggagtgcagtggcgcgatcttggctcactgcagcccccacctaccgggttcaagcaattctcctgccttagtctcccgagtagtgggattatgggcatatgccaccacacctggctaatttttgtacttttagtagagatggggtttcaccatggctggtgttgaactcctgacatcaaatgatccacccaccttggcctcccaaagtgcttgattttcttatttttgtttttaccagtggataatcacattatgtgattttttttaataagtaagtaatttgcctctttatttcctatcattatatgtatattttttaccttaactgcagtctgcagagcaatgttgagtattaatggtgagaacaaatctttatctcattcctgacttaatgaaataccttgaatgtttcaccattatgactcatattggctgttttaaatagacatcagattagggacattttctgtctaatttactctgagtttttcttggcgacacatattggatgttttcattgcttttttggcatttattaaggtatttatatatttttctcttgatttattaatcttttgaattatattaatcgattgtctaaccgggcgcggtggctcacgcttgtaatcccagcactttgggaggctgaggcaggcagatcacctgaggttggaagttcgagaccagcctgaccaacatggagaaaccccatctctactaaaaatacaaaattagccagtcgtggtggcaggtacctgtaatcccagctactcgggaggctgaggcaggagaaatcacttgaacccgggacgcagaagttgtggtgagccgagatcgtgccatcgcactccagcctgggcaacaaagagcgaaactccctctcaaaaaaaaaaaaaagattgtctaaaatatgaccatatttgtatttctagagtaaacacttcttggtcctggtttattagttgttagtatttaaagatttttttttttttttgagacagtctttctctgttgcccaggatggagtgcagtcgcgcgatctcggctcaccgcaaactctgcctctcgggctcaagaaattctcttgcctcagcctcgcgagtagtggcattacaggcatgtgccacaaggtctagctaatttttgtatttttagtagagactgggtttcgccatgttggccaggctggtctcgtcgcgacctcaagtgatccacctgtgtcggcctcccaaagtgctggaattacaggcatgagccagtgcacctggcttacttgaaaattttaaccctcagtggattagtggaactcgtgtactttttcttttgtgtgtgcatgtgctttttaaatgaaaaagacagccttggtgagatataattcacgtcatatattttaaacatttaaagtgtataattaaatggtttttagtacgttcacagagttctgcaaccatcactgcagttttagtatatgtgctgcacccttaaaagaaacgccattctcatttccctctaactctcccagccccaggcaaccacaaatctattttctgtctctttggatttgcctgttctggatgttttacagaaatggaataggtggtcttttgtgagtggcttctttctgttagcatcatgctttcaaggcgtgtgtgctggcttgagtgcttttctaagagcattatataagcttggagaaaatgataaacttttaaattttattttctgttctagactacttcagattgcatggcgtttttcttttttttattctttttttttttattatactctaagttctagggtacatgtgcacaatgtgcaggtttgctacatatgtatacatgtgccatgttggtgtgctgcacccattaactcatcattcacattaggtatatctcctaatgctatccctccccactccctccaccccacagcaggccctgrtgtgtgrtgttccccwycctgtgtccaagtgttctcattgttcaattcccacctatgagtgagaacatgtggtgtttggttttttgtccttgcaatagtttgctgagaattgcatgacatttttctagtcctcaaaaaattgacagaatttacctataataccctctgggtctaatgtctttctggatagtcattctcracagcctttccaggattttcagtgattagtctatgccagttttctactctgtcgcagaaagttttcttgaccattcttctactcatcatttaaaaatttaaaagcttctatatgtttttggtaagagttctttgctcagatctaatagcatttatcagtgtttttctctcctttaaagtgagattaattttaaaatcctttcgacgaactaactccttattctcggttcccctctttccttatatttgaattttattaattcattttgtctgttcctcttttctccttggtctgcttgctctctttctgcccttttgagttgaaatctcagttcatttattttctttttgtcttgcttaatagcaaaagcatttaatattatgtatttccctcaagtatggatcttgctacagctcataagtttttatatgtartgtttgagttgtcactgttttctagatagtgtttaattccagactttctttcctctttggtctaagagttatttagaagtatttttaaaaaccaaatcaattttttaaatataagcttctattcttaatttctttcaccgaattgtggttttttttgtttgtttgtttttttaagaattaaaattttgatttgggcacagtggctcatgcctgtaatcccaacacttttggaggccaaggcaggaggatctcttgagcccaagagttcaagatgagcctggacaatatagcaagaccccaactctacaaaaaatgaaatgataaataagtgatacatgataaataaatgacaagaaaaatgataaatagggcrcacacctgtagtcccagcttcttgggagtctgagatgggaggatcacttgagcccaagactttgaggctgcagtgaggtatgatttcaccactgcacttcagcctgggtgacagagtgaggctctctttagaaaaaaaaaaaagattttagggccaggtgtggtggcttacgcctgtaatcccagcactttgggaggctgaggtgggaggatcacttgaggtcaggagtccgagaccagcatagccaacaaggtgaaaccctgtctctactaaaaatacaaaaattaggcaggcatggtggtgtgcacctgtaatcccagctactcaggaggctgaggcaggagaattggcttgaacttgggaggcggaggttgcagtgagtcaaggtcacaccattgcacccagcctgggtgacagagagagactccgtctcaaaaaaatttaaaaataaaaaaggattttagggaggcctaatatatgatcagtttttataatggctgttggataaaaaagtatttattgggtagaaaagttggtatgcatttaaaaaaatcatttgtatttgcttccttggtttgttcctgagaagcagtatgaactgagcagagcagggggtgactctgtctactttctagtgcagtrtctgataaaaaggggcctctctggtggatacaggcccagaggctctggagcaagaattaagcatcttgtttttttgttgttgttgttttctggccagttatgtaaagtatagtcagtgttttctctgtgctgaatcatgggttgctttttctcaatttttctccatctgccttaacatgattggtgattctacctagatcctggccttagattctgtgttgctcttattattctgacttctgccatccatcattttctctgttctctctggtggtttagtaagtcccagaccggaaactccaggagggtaagagacatgccaacattgttcattattgtgtctccagggcataagtaccctgcctggaatagagtaaataaacatttttttttgcatgaatttcagttgcgagtggctgcctgggtaaaggggagtgctaaccagatttcatttggaacatcattcataattatattccaggtatcttttgtctagcattataacccagttcaccagcaaacttggttccacagttgtagtagtcttttgtcacattgctgataaagatataactgagactaggaaatttacaagagaaagaggtttaatgggctcacagttgcatgtggctggagaggcctcacaatcatggtggaaggggaaaggcacgtctaacgtggtggtaggccagaaaaaagaatgagaaccaagcataaaagatttccctttataaaaccatcagatctcatgagacttattcactaccatgagagcaggttgggggaaacttcccccatgatttaattacctcccactgggtccttcccacaacacgtgggaattatgggagctacaattcaagatgagatttgggaggggacacagccaagccatatcaacaatattcatggttgacattctttaatcactatcctgtgtatgtcagatagcagataagaggaaaatgtgaatgaggctctgaattaagccacatgttcaggatgctgtcccagacttccgctcttgactgtctcatctctttcagcaccaccttctctccttctctgcacaaatcctcagtgagtgttgaatatctcatcaggtctgtttgaggacatcagcagacactccttttggttcttggcattccagctcccaaatgggctttccacgtctttcttccaagagcttttctcactgtgttctggctctactcaatgactcacttgctaatctcccatatacctattcacactatgatatcaaaagctcatatcacaacttaatatgtcccagggtattgtcaactgaagaatgatcgggttcatacatttggaaaggggagcttttttaaaatttttaagttccagggtacatgtgcaggtttgttacagaggtaaacatgtgccatggtggtttgctgcacctagcaacccatcacctaggtattaagcccaggatgcattgtcccccagactccaccaacaggccccagtgtgtgttgttcctctccctgtgtccatgtattctcattgttcagctcccacttacaagtgagaacatgtggtatttggttttctgttccagttttagtttgctgaggataacggcttctggcttcatacatgtcactccaaaggacatgatctggttcctttgtattatattccatggtgtatatgtaccacattttctttatccagtctatcattgataggcatttgggttgattggaaagaagaactttatttctcataaatggttgcagccttcccaggccattctgacagcctgggaagtgtagcctctggtcagaagccagaaatactttgagagaaggtcaaaggtaacaagaatttatgctgagtggggtggctaaatgtatgtatttaataagctataggaggagtcataaatatttaccaaaggagaaatgtgtgcatgaacaattcagctttatgcctcttcatgagttgcatgtacaaaaatggcagtgttagcatgatctgagggtggaattttcagctctctgacatcaaaaggtgaaatagaggacatgaaacccctcactgcacatcctccgttgaactattccatggtcagtggtctcttatcaagaaggaatcctgggccaggcatgatggcacacacctataatccaagcactttgggaggtcaaggcaggcagaatggcttgagctcgggagtttgagaccagcctgggcaacatggtgaaaccccatttctacaaaaaaatacaaaaattagccaggtgtggtggtatgcatctatagtggcagctactcaggaggctgagatgggcccattacatgagcctgggaggtcaaggctacagtgagccatgacacatcactgcactccagcctgggcagcagagcaaaatcttgtttcaaaaaaaaaaaaaagaaggaatgctggtcagttgttcatgttgaaaccatcaaagggaggggcagcagtcagacagttggctgaaatagtaggtggagcctattgaaagggctggtttctgtttggcacctagggtagaaagcttaatggcagttagggagggggaggtataaagaggtgtgttcaacctcccatcctgtcatggctggaaactcagtttgaaggttgctctggggtcctctttgccaggtggggtccagtcagtcagttgaggggttttggattttattatttcccagtatgaatattttccagggttttgttttgttttttgtttttgttttttttttgcattttaataagtctgtatccatcttctcatttattcatttagcaaacatttcttgaacatcactatgaggaaagcgctgtgccagaccccagaccagaccctatgggatgagccaacagttcttgttcccagagaaggcagctctctctcatgctcatagtccacactccccagccagcacggggcatagggacttcatctgaaatctcaaatcccatgtggcaaatatcacagtggctaggagatgacttctttgtgagagattttcctgtttgagtaagagaacaagttaggcttttgaaaccaagtagagctggatcaaactttggtcccagtacttgtcagttgtttgacctaatgaaaggcagggaaccttctgttcctatgagaaggctcaggatacatcacctacccctcagagctcctgtgaagattagactgtgaggccggggacggtggctcacgtctgtaatcccagcactttgggaggctgaggcgggcagatcacttgaggtcaggagtatgagaccagcctggccaacatggtgaaactccatctttacttaaaatacaaaaattatctgggcgtggtgccacgtgcctgtagtcccagctattcaggaggctgaggcaggagaattgcttgaaccyggggggcagaggttgcagtgaggcgagatcgcaccactgcacgccagccttggtaacagagtaaaactccatctcaaaaaaaaaagattaagctttgaatagtatgtgagatgccagtgacctgaccgccaagtatattgcgagagtcagtgaattgttagttcttttttataattcgaaaatcaagtattataaggcctgggaaggatgcttatgatattaaattcatattttaaaatgagccttggccgggcgtagtggctcatgcctgtaatcccagcactttgggaggccgaggcgggtgggaggcctaggtgggtggataacctgaggtcaggagtttaagaccagcctggccaacatagtgaaaccctgtctctactaaaaatacaaaacttagccgggcatggtggcatggtggcggacgcctgtaatcccagctactcaggaggctatggcaggagaatcgcttgaactcttggcggaggctgcagactccataaaaaaaaaaaacaaagcctctctgtagaaaggatctaatggcattcttgaacccaaaatatctgagacagatttcaaccattttagaaagtttattttgcgaaggttcaggacacacctgtgacacaggctcaggaggtcctgatgacatgtacccaaggtggacggggtgcagcttacttttatacattttagggagatggagacgtgagacatctatcactatgtgtaagacagacattggttctgtccagtaaggtgggacaactcgaagcggggggttccaggtcacaggtagataagagacagaaggttgaattcttttgagtccttgattaaccttccactgaatacacaatttagtctggctcagtgtgtctgcattttyacaaaaacaatagaggcagaggaaacaatcagatatgaatttgtctcargtgagcagagggatgactttctgtcctgcacctgtgaagataagctatccgtttacattgtcagggtgaaattcaacagaaccctctgacggaaaagatcttgaggcctgcagggaatttccttgtgggcaaattgcaggggagatatgcacctcttttgtcttttaagctatcttatttaggaataaaataggaagcaggtttgcctgatgtagttcccagcgtgacttttcccttggctttgtgattctggggttattttgttaccggaaaggggtcctgatccagaccccaagagagagttcttggatcttgtgcaagaaagaattcaggacaagtccgtagagtaaagtgaaagcacgtttattaggaaagtaaaggaataaaagaatggctactccatagccagagcagccccgaaggctgctggttgcccatttttatggttatttcttgatgatatgctaaacaaggggtggattattcatgcctcccctttttacaccatatagggtaatttgctgtcattaccatggcatttgtaaactgcagtggtgctggtgggagcatagcggtgaaaatgaccagaggtcactctcgtctccatcttggttttggtgggttttaaccagtgtctttaccacaacttgtttttgatcaacaaagtttttatgacctgtatcttgtgccgacctcttatctcattctgtgacttagagcgccttaactgtctgggaatccagcccagtaggttccagccttattttacccagctccttttcaagatggagttgctctgtttcaaacagctctgacatttttacacattttatccagaacagcaggcatctccagaaggcagggacaccactgcccacccttcctttcctctaccactctttgaagccacgctgtgtttcccagtagggcgctctgttctctccaatccccacactgtcaaagacagccacaagcagagatctgtgtgaggggtcacctgctgccagggctcaggcagcaggcttggccagtccttttccagcattcagcctgtgtatggaaggattctatcctgtgcattagcagaataacatctaattggtctttgtttgctccagaacatagaaagtagagctttttcattgcattaacaactacatcgaaacaggagacttctctcaccccccttgcaggatgtgctgcaggggcrtggcttgtctgttcgccacccttaataggacggggagcaagtaaacagtcaggtgcaggagcgggggcsagtgcttttgggctgcagccccacggtagcatctaagatgggtgcctgtggctgccaaagccctattgggcatgttgcatttatacgtttgtactcagatacatttagctcagttgcagtgctcctttagctctgctacctacagatggcttaaatgttaaccagctcagtgccctgttggtgcctgggttcttgcctggtgtccaggaagaatcaggtcacacatggacttgaaggatggtgaatgcaggggttttactgagtgttggaggtggttctcagcaggatggatgggaacgtggaaaggtgatggagtgggaagaggatcttcccctggagtttggctgtccagcggctcacctcctctccaaccgtccccagctgaactcctctccatgttcagacgctccttcttttctctcattctctgctgccctgttcagcgggtcttctgttcgtctgctccgggagctgggggttcggggtttatatgggtacagggtagggggcgtggcgggccaaaaggcaatgtttgggtgtgaaaacaggaatggctgttcccatttagggccacaggtttccaggcttgagggtggggcctttgctggggaaccgccctcttctacccagtattttcctgtctcctgtccatatcaacatgaagtagtacatgggcagaacggatatacaggtagggttggatattgcttaaaaaaaaaacacctttcggcaaattaaatttaacagagtctaattgtgcaaagaacaattcacaaatcagacagcctacagaagaagaataggttcagaatgactctggggctaccacatgggcagataacataacatttatggacagaaaaaggaaagcagaatacagaaaaaaaaagtgacagacagaaacagctgggctgattacagctgggcatttgccttatttgaacctgctttgaacagttggttgcctgtggttggctgagactcagttatttgttacaagagcaggttacagtctgtttacacattaagataagttacagtttactatgtatggagaaaatttcaggctgaggactaagctctaattttttcttgtcttgcccaaatatctaagagacctggggagtcatgccttataaatcatagtctcatcacatgggttttatttaaccctatagatcgtgacttactttccagtctgactctggcataacacaacatgacaaagaagaaagtcaaaatattttatcccaaaacatgtttcttggccatattttgaaatggtcctgcaaagccattcattgtgggggggaaaattgcatctgtaaagaatctctgtttacatagctagatctttttctctaggccctccctatcctgaagagattacctgacagtctagcaccttttaaaggtctgaataaaacattcgtcatctactgtctctaagggcagctgctatgagacttcaaaagaaccttggtctccacaatgttttattttaacatgaacatttcctttctattaaccccaggtctttagacacactcaaccagttgtcaactagaaagtgtttaaattcaccttatagcctggaagcccgcagcttcgaattgtcctgcctttatggaccaaaccaatgtagttctctaatgtatttgagtgatgtctcatgcctccctaaaatatataaagccaagctgtaccccgaccaccttgggcacatgttcttaggaccccctgagggctgtgtcacgggccatggtcactcatatttggctcagaataaatctcttcaagtgttttacagagttcaactctgttcatcaacaaggccaaacttaacacaacaatatgtctatcaaatagacaaggatggcagcattggaccataggagtgggagggaaaagtaagctaccaactgtgagattcttattacctaaataaaatttttggtraaaaacgataaaaataaatactaaatcaccaccatctcaaaaaacaaaacaaaacactacaagcagggcagtcatttttgtggtcactgcccacctgcaattggtctgtgtgatggaccttttgaaggataagtagatctcacaccatataatggagtttgagaccaaaatataagaagtagtagtgttaccagaaaggggtcctgattcagaccccaagagagggttcttggatctcatgcaagaaagaatttaaggcgagtccatagagtaaagtgaaagcaagtttattaagagagtggaggaataaaataatggctactccctatgcagaacagccctgagggctgctggttgcccatttttatggttatttcttgatgatacgctaaacaagggggtggatcattcatgcctcccctttttaggccatatagagtaacttcttgatgttgccatggcatttgtaaactgtcatggcgctggtgggagtgtagcagtgaggatgaccagaggtcactcccgtcgccattttggttttggtgggttttggccggcttctttactgcaacctatttttatcagcaaggtctttatgacctgtatcttgtgccaacctcttatctcatcctgtgacttagaatgcttaaccatctgagaatgcagcccagtaggtctcagccttattttaccaagcccttattcaagatggagccgctctagttcagatgcctctgacagtaggggaaaggagagacataaaacttcacattcctgaagactttctcatgcttttgattgaaactcaagccattgaagaatatttcagccagagtatgcagcaacccatttttctaggtccagtagttgacaccgtagacttgtcaaggaaagccaaatgcacacatcactgtgaacattggaaatactatctccaggatgttagaaaacacttttaaaaatgacttgaaggaaaagtcggaaggagaacataggaaagggcctttcatttctcttaagcaggagtgttaaagcaattattgacctactgtactttgttctcattaagaaaccaagtacctttttaatgacttctatgggaagtattctaaatacagaagtgataatagaaggatttcttggaagcagaggatagcactctttcatccaaaagaacttagaggagcatttgaagagggattgctgaaggctgtggttttctttcctgtgcacattaattcaatgtcctttttactcagtagggtgtaaacatacatcatttaaattaacataaaaagtcakaaatgagacctccattaacatatccgcaggggaggaatgaggcagtcccacgtgacttcttgctgctgttgcctcccaggagtggggctgccaggcgggtcctcctgctgaccccctcctcctctgccttttcctgtccggttctgcagtgtcactcccagcaggtcggctcatcttggcgctctcggccacagatgtctcgacaggtccgagttacttatgtaattgctatcaacttgctgtgcaaccctctggggcaggacatgatgcctatctttaacctctggatcaattgaaaactggcttaattggctcagtgtccagcagtgccattatttgactcccctgtctggcctcttactcttcaaggatgcagaggtctgggaaggcagagcagacctgcccctactctgcgatggtgggagtgggagctgctctgggctagattcagaggattctccagctactcagccacccagagtcctccctggagcccttgcctggtggggcactgtggggtgcagtgcatgcttctcccctgtagtggagagcctgaaattctggccctttcatcctcttttcaagattattcattcctcaccctcagccattcgttccctccactcagagcctgacacttattaaaatactaaggaagactttattcaagactattgcaatagacgttgactctgttgcaatagaggagagagattggggtcaactctgaatacaacaagacaagtgggatttatagctaagtagcagagtgacagggttgtagctgtgaaccccccaaatttgggacaggtctcagttaatttagaaagtttattttgccagggttgaggactcacacccctaacacagcctcaggaagtgctgacggcatgtgcccaaggtggtcggggcacagcttggttttatacattctagggagacgtgagacatcaatcaatatatgttaaaagtacattggtttggtctgcaaaggtgggacaacttgaaacaaaggcgggaagacttgaagtgggagggagtgtccaggtcccagataggtgagagacaaatggttgctttcttttgagtttctgttgagcctttccaaaggaggcaatcagatatgcatctatctcagtgagcagagagrtaactttgaatagaatgggaggcaggtttgccgcaagcagtttccaccttgagttttccctttagcttagtgattttgggtacccaagatatattttcctttcacatggctgtaatatgtctgttgctggatccctatggcaagtggatgcactgagacagcagattgcagcagacaaaaaggtttaattgttgggccactgaacaagtagatgggaggaaacctcaaatccatcgcctcaaggaattggtggttaggggttttgagggttctggaatgggctgaagtgtggagattgttgattggtggaagagtgcagggtgaagtcacaggacagggaggggaagcatctctatattctcaggctgatcccattcctctgtgagggtcttaaaactggttgctagaatttggggtctaaaaaacatcttaagtgatccttaaacaaaagccgtaggattctaacatcagagaccttatatatagaaacaatggggttgcaaatcaattcttaaacagtctgagggccctaatatcagagatcctatctgcacatgggcagtgtctagtgctacaggactttcagcaacaaggaagtgggccagagtgcagcctgattaatgcttatgttaccagaaaggggtcccaatccagacctcaagagagggttcttggatctcacgcaagaaacagtccaaggtgagtccatagggtgaagtgaaagcaagtgtattaagaaagtaaaggaatgaaaaaaaggctactccataggcagagcagtggcatgggctgctagactgaatatagttatagttatttcttgatgatatgctaaaccaggggtgaattactcatgagttttctgggaaaggggtaggcaattcccagaactgagggttcctcccctttttagaccacatagggtaacttccgggcattgccatggcatttgtaaactgtcatggagctggtaggagtgtctcttagcatgctaatgcattatagttagcatataatgagcagtgaggacaaccagacgtcactttcattgccatcttggttttggtgggatttggcaggcttctttactgcaacccgttttatcagcaaggtctttgtgacctgtatcttgtgcccatcccttatctcatcctgtgactaggaggcctgacctcctgggaatgcagccagtaggtctcagccttatttcacccagcccctattcaagatggagttgctctgattcgaatgcctctgacacttaattataactatatttctgttccgaacccaacctccaagtcttttcaaccctattgggatggtttcagtgtcagtgggtggaagactactaataagagacattaagcgtgggggattcttgttaaatggacctaacaggattcttgctaaaggcaggccaagggctcagacagcaagggtatggggtgttgaacttgatcaggtatcaaattaggggattttctcaaacctgattttgcaggattcttactaaaactggacttggcatggacagacacagaaggccaagttcaaggcctagtagataagtgggatcagaggagcctaaccaaggattggtcaaggagagcatctttgccaagaacacgctcctggtccccttcccctttgcagctttgatgaacccaacctctcaacamgagtggggttggggaaaggctctcttttgggactcccctgaaacagaaagaagctgtcatactgtccccccatcttccctccctcagcacaacctttagaccacagatatttgctgggaaagtgatcttttcattctttcctgtttcctttgacaaacagaaagggcaygggtttgaatgccagttgataatccttccatgttgctagtctcaggctccccacttggtccgtggacaggatcaagactccaaaaaccttggtgctctggggctgaggagagacagacatgagaagagactgctttctcttttgtctgtttcccttgtctagtcttgttctccccagcatcctcaatacacattagttccagagttacaattgcagctgagttcaaacttgcactgctcagtgcaggacagccaataagtaaagagacaaggtgttggggcaaggaagacaaatttattttggagatccagcaaactgagaagatggtggactagcattctaaagaaccatcttaatacgaacttaagttaatatgagccttaagttaatagggctccttttatgctaggggaaaggggaagagaaaaggggttgagatcaagaggtgaccaatggccacagacatctaggtggcagcaagggtacaaggatgttgtgaaaattctttttccttggtcagatcacaatgctcctataaatgtttcacataacatgcttacttgtgggtataccctccttatctcctcaggggctaattttgggaagggactactgtccttactttaaagttaaatataaactaaattccttccctagttagctcagcctacgtgcagagataagcaaaagtagttaacctaaaagatatcaccctttggggggtgtcagaggcaaaatagagtcagtcatgctaagctcccctccactgttacacaacataatttaaagaagaaaagctttatgataactttattcaacctacttaagcatcactctcttgagcaagacgttgccaaatgtaattttctacatgcgtgtttctatagactttgatctctccaggataactgcatgggaagccacagaagaatrtggcggaagcttccctcccagcccgatctcctcctactgtgtccaaacctttggcccctctgaaagttgattgaaaaatcaactcacaagaggcagattcatggaaaaggcatacagatttatttaacatgtatacatgggagccttcagagtggagagccaatccaccaacgaggttccgaagcttatatactgtcttgaggttatagaaaggatgcatggccaaaaacaggttatggtggtaagtcagcttttattgraaggacagtttatggtggcgggagaaagaaagaggcttggctagcaaaggtggccttgttatgtagatgaagtctcacatggtagcagccctcagagagaatggatgttaaatatctcttttcagacttttaaaggtgtcagactctcaatctctcctggatctaggaaaggtctagaaagggaaggcctggctgcatgaatggagattctttacagatgcaaatttccgccacaaaagatagctttgcaaggccacttctgtcagctgaccctgcagtggccgtttcaaaatacatcaaagtcacrtactttggggaaatattttgattttgcaaatcaaaaataaaagtcctcctgctgactaaatggaccaccctcttggccaagggtatcccaaggaaacctgaaaaactagttcagaccatgactggaagttgaggggtcagatatgcctcattgtaccctctcccttggagtgtagatacaaatgaccagcattggtgttaaaatagagatcataagactgacaaaacagactctttgtagcaataaggtaccaacttccaacttcactctggtatagtatcacatgacagagagcagacctggaaagaaatcaaagtgttttacccaaaaatgtatttctctgacatattttgaaatgtctctgcaaagctgtttcttgtgggggaaatttgcattctgtagagaattcccttcccttcctaggtctttcctggagagtctgacactttttgtggtccaaagagagatatttaccatctattctctctgatgcctgctacctggaggcttcatctacataacaagagctttggcttccacagtcctcatcttgactcaagcatttctttatgctgacttgaaactccgcagacaaaatttagctcttttaacagattgccaatcaagaaatctacgaatccatctacaacctggaaacacccgttttgagatgtcccacctttctgggatgaatcaatgtataccttccatacagtgatttatgtttttgcctgtaacttatctctccctaaaatgcataaaaccatgtgcccaaggtggctgtaacccctccaccttgggcacatgtgctcaagacctcctgaggctgtcacgggccatggcccttaacctgggcaaaacaaacctctaaactgattaagacatgtcttgggtaatttttgatttacgattttcttcatggcctctgacattggtgggaatgaagttcctaaatagcttcttttatctcaaggttgcttagtagaagcactgacccctgctttgtcttttccctaagtctagttcctctttcaagttatgcctgggaacatttcttggagacacagcagtcgtagctctgggatatctacaaaggaggaacctagggacagctctctggttggaaggaagtgaggccaggccacatgtctctgtttcattttcatgcaatgtataccatgttatagatcaatagattcagctgtgttttccaaatatggttttatgcccatcaggctcacaggagatggagtaaatatcagttgtctgtactaccgaaacatgactatttaaaaacaattgggctacttcaggggagtggggcaaagtcatgcctgggagattgtggtcttcaagggacaattgcaaaagcaaggagtcttatttttcaaagttaggaacatctcactttctgcgacatgtgttcttaccaaaaaaaaaaaatgacatttggagtaatttctgcatgtgaatcctgcttatctgaccccttcctcatggcaggactttggctgctgagctaccagcttcgtcccagaaggaaggtttgggactctgagggcctgagacttatgcatggagttctgctctagacaacagggaacatggaaaggcaaaaaaaaacaaacaaaaaaaccctcaaaatctgcagggaaacctgaatttcaaatccaggaaaactgtccatggatgacagctgtggtggggatcaaggggtctcagagccaaggtgtattggctagtgtctccatagactgccaaaattacacgggcatcctgggtgagaacctctacaccagccaggccttgcacctggattttatgaatgcatgtgggaaagactatggtatggtctagggcattcttttctcgttattttaatttcttaaattttagagacagggtcttgctctgtcacccaggctggagtgcaaaggcgtgactgtacctcactgcagcctcaaactcctgggctcaagtcatcctcctgccgcagtctatagtgtagttgggactgcagatgctcaccaccacacctggctagtttttaaaattttcttgtagagatagagtctcactttattgcccaggctggtctccagctccttgcctgaagcaatcctcctgtatcatcctcccaaagtgctgggattacaggtaggagccatcacacccagtcttttctagggcattcttcatatgatagatgagattgcccaaaatcccactggcccaaactcctcccatctttttattttattttatttattattttttttaattggagacagagtctcattctgttgcccaggctggagtgcagtggtgccacctcggatcactgcagcctccatctcccaggttcaagtgattgtcctgcctcagcctcctgagcagctgggattatggatgcccaccaccatgcctggctaatttttttgtttttagtagagccatagtttcaccatgttagccaggatgatctcaaactcctgacctcaggtgatcctgctacctaggcctcccaaagtgctgggattacaggtgtgagccactgtgcccggccctaggctcctcccatcttgacctgggtgtttgcgatggtgtctggtgctacacggtgcattttaggttctccatctgggactgcttttgttctttcattccttcttcttgtagagtataatgcattcattcattcatctatttgctcaataaaaaatttgttaaactcttattatttgttgagttcagggtcatgatcataaatcccaacagaagctcttgcctctggaaggagctcagagattggtgggggacagaaacgtttatcacatccttaaactgatgagctcacaatgacaaagtgacatgcgtgctctgatggtagagagcacggtgttgggagaaggtggttggagtggagatatggtgtatataggagtccggtaagtgaaggcacagcagaggagggaaggtgttctggcttcaggaaagggtggggtatgtgaaggttctaaggtggaaggccaatgactgcaaggaagtcattgttgctgaagagaagggataggtaatggtgtaaaagaaagttctggagtcccaaagatctgagttcaaatgatggctctgctgtgtcaccgtgtgcaagttatttaaactttataaccctcaaattcctcatttgtgaattaacagtattcctgtggcctaggactggtcacggaaaaaccttcgacacattaaattacacagagtttaactgagcaaagaacgatttacaaaccgggcaacccctgaaccagaataggttcagagagactctgtcgcagctgcattgtggaagtagatttgtggacagaaaaaggaaaataacacacagaaaatggaagtgaggtatagaaacagcgtgattgggtacaaacgaagattgcttagcgcttgccttatttgaacatggttggaacacttgaccactgttgattggccaaaactcggtgactggcagaagagtaggtgaccatctgtttatacatccagttctgttacagctcactatggacagagaaaccttcagggtgaatttaaaatatgtaaggaggtagctttaggctaaacttaattgaataggatttagtaattccctcattctttgaagactgacatcagggaccagaggaaaatatgactttttcacacaattagagatattgttcactggattaaaatgttggtctcaagatatatagtacccttacatttaagattgtagtccaggccaggtgcagtggctcacgcctataatcccaacactttgggaggctgaggcggacggataacctgaggtcaggagttcaagaccagcctagccaacatggtgaaaccctgtctctactaaaaataaaaaacgtagccgtgcatggtggcagatgtccataatcccagctactcaggtggctgaggcatgagaatcacttgaacctgggaggcagaggctgcagtgagccaagatcacaccactgcactgcagcctagaagacagagcgagactccctctcaaaaaacaacaacaacaataaaagcaaacataaggttgtagtccagttagaaattaacagcaatgatacattataaaargtaagrgacacaatgtgtcttaaatacatatttaagttttggaggatgtttggttggtgggttggttcctggtatctcctgtggtacagaggagaaacagcagaagccaacttgaacggagcacttgaaatcgacaggtccttggcttcggtcatgcctcttcccagtgcttcctgtgtaaaggatgtttaggtctttcsattactcatacacagacccagattcagaaaggaaaaactctttgtaaactgctcacttttagaaatgaaaagattgatccaagtggaaggagggagacgatgtgatataaaaactgcaacctaggcagggatttaaaatgaatcagaaaacgaacagaccagagaacgtgcttaattcaaagacacccaggggaccctcaagttctaaaaacaagtgactaggaatcaaagtcagctgtttgatttttgtattttagagagtgagggtgggtgttttgcatatgaataatattttgaatgctattggatttttttaatacagtgggatcattgcttttccctatgtccttttttaaaaactctttttcatgcaaattcattaaatttgagatgcagtaatatactggaatcttgcccatctgattccccaaaccacagttaatccttggcacattttgaaaagtatacatgtagttttaaaatggaattatgtgtgacccaaatgtgacggcagccctgtggacatcctttcttcttagcctgcattcttctaaaagtagagctcagcattttttttcctcttttttctgtttttgttttttttcttttccccagtgtctcactctattgtccaggctggagtgcagcaatgtgatcttggctgactgcaacttcaggctccaggctcaagtgattctctcatctcagcctcccaagtagctgggactacagacaggtgccaccatatccagctaatttttgtacttgtcgtagagaaagggtttccccatgttgcccaggctggtctccgaactgctggactcaggggatccgcctacttcagcctcccaaagtgctgagattacaggcaggagccactgaacctggctgagctcagcattttttttttccaaaaaaaaaaaaaaacaaaaaaaacmaaaaaccatatttggctctacaaagcatattttgtgtaaaatagattctataggcaattaatgcaagagatcctagggaaggctgtgtcacaagccactgtaaaacttaacaaaattgcaatcacagacctaattctaccttccaaagtcctcatgggccactggttatcccctcctcctccttgtcctagatccttctcttctcctttttttatgctaagcaggttatctcttagctttttcagtctgaattctcaagctcagaatctcttttagcaaacaagagccttccagcaatccatcctttgcagttgaggattataaacaaccaagaccatttttttcccatcagagatatttgtttttcagtttgcatgtgtgtattggctgaatcctaatatttgcatttcatgattgtgttctgaactgggagaaaaataacccaaatttccctaagcaggtacattatcctgtctgccctcagaaagcctaatctgtgtctcatttttttttttttaatgtaggttgttatcttactcattttgggctgctgtaacaaaataacatataccgggtggcttataaacaacaaaaatttatttcccacagttctggaggctgggaagtccaacatcaaggtgctggcagattcagcatctggcaagggcccatttcccggttaatacatggccccttctccctgtatcatcacatagtggaaagagacaagagagctctctagggtcccttttctaaggcatggatcccactcatgagaactccatcctcatgacctcatcacttcccgaaggctccacctcctaaaaccattgagagaataacattggaggttagggtttcaacatgagagtttggaggggacacaaacatttagctcataatggttattgtggaagatgtttactgaacttctgaagcaaatgacaaagctagcttaatgagacattaaaagttatttagggctgggcgcggtggctcatgcctgtaatcctggcactttgggagaccaaggcaggctgatcaaatggtcaagaggtcaagaccatactggccaacatggtgaaaccccgtgtctactaaaataaaaaaattagctgggtgtgatggcgtgcgcctgtaatcccagctagtcgggaggcagaggcaggagaattgctggaacccaggaggcagaggtttcagtgagccgagatcgtgtcactgccctccagcctggggacagagtgagactttgtctcaaaaactaaactaaactaaactaaactaaaataaataaaaattaaaaagtcatttagtctggatatcatattataacagtgttgcacaatggaccctcagtccaaataatccttcttaaatgtaggaccttgtgacctttgttgaccaaaacaaaaacgaaaaccaaccccacaaagcccaaactgtgaagtcttgaaagaggtttcttctgagccaatatgagtgaccataacctggggaatgagaggtcccaagaaagtgtgcccaaggttgtcaggttacaggttggctttatacaatttatgagacaagaattgtaggtaaaatcatgaatcagtacatggaaagtatacattggctcagcgtaaagaggcaggatatcttgaagtgtgagggagttggggctggtatgaggccattggtgaattcaaagattttctgattgtcagttggttaaaagagttaagctttgtctaaagacttgaagtcagtagaaagaaatgcttgagttaagaaaaggggagctgtggagaccaaagttcttgttatgtagatgaagcctccaggtggcaggcttcagagagaatagatgttaaatatctcttttcggaccttaatttagtgtcagactcttagctaatcccttctagacctggtaaaggcctggttggtttaatagagattctctgcagatacacattttcctcagaaaagacagctttgcaaagccatttcaaaataagtcaaagcaatatattttggggtaaaacatttggatttccttcagggtctggcatgtgacactataccagagtcaggttgcaatttggtatcttactgccacagtgagtctgttttctcagtcttatgatctctattttaatgttaatgctggtcagttgtgcctaaactccaaaaggggtggggcataatgaggcttgtccatcctttcttctcttcatggccaggaatccaatgtttcaggtttctctggggtccttttggcccagaggggcttcattcagtcagtggggtggcctaggcttttatttttgccttacactttggacaagtctcctaacctgtcagggactcaattttataatctgtaaaatggggacaaatatcagtgcttattgttaccagaaaaagttcacgatccagatcccaagagagggttcttggatctcacaaaagaaagaattcggtgcaagtccaaggagtaaagtaaaagcaagtttattcagaaagtaaaggaataaagaatggctactccataggcagagtagcagtttgggctgctggactaaggatacttatagttatttcttgattatatgctaaacaaggtgtggattacttatgagttttccaggaaaggggtgggcaattcctggaactgagggtttctcctctctttagccatatagggtaacttctggatattgccatggcattcgtaaactgtcatggtgctggtgggcatgtctttagcatgctaatgcattatatttagcatataatgagctgtgaggatgaccagacgtcacttttgccaccatcttggttttcatggatttgggcaaggcttctttaccgcagcctgttttatcagcaaaattttttttgacctgtatcttgtgctcacctcccatctcatcctgtgactaagaatgcctcacttcctggcaatgcagcccaataggtctcagccttattttacccagcccctattcaagatggagttgctctggtttggacgcccctgacattgtgtcacaggcttgttgtgagcatgaatgagttactatcagtaaagtctaacatccagaaaggtaaaattatgcctcaatataaaatgaaaatgaggaacatattttattcaacttattaattcatgggagaatcaataaggtgttaagtccagttcaaatgagaatttaacttacagaggtgtatattctccaccagaaaaaaaatcattacaagagtcatttgcggtgctgttagtttcctacaactttgcagctatccctacagcaatgggctgaaaaatgccttccacccaagatacccacattccaatcctagaacctgtgaatgttacttcatgtggcaaaaatacgactttacagttgtgattcattcactccacaacagtctccagatggggagattatactggattttccaggtggccctagaaggagagaggcagaggaagatttgacccagacaggagattagaaggtggtgtgaccacagagacagagactgaagggatgcagccgcaagccaaggaatgccggcagccaccagatgctggaagaggcaatgaatggcctctcccctggagcattcagagggaacatgatcctgctgacaccttgattttgttccccagtgaaactgatttcagacttcttgcctccagaatgtgagagaatcaatttctgttgctttaagccagtggtccccaaccatgttggcaccagggactggcttcatggaagatagtttttccacagaccaagggtgaggatgatttcgggatgattcaagcacattccattgattgtacactttgtttttattattattacattgtaatatataatgaaagaattatacaactcaccataatgtagaatcagggggagccctgagcttgttttcctgcaactaaacggtcccttctgggggtgatgggagacastaacagatcatcaggcattagattctcataaggagcgtgcaacctagatccctcgcatgcacagttcacaatagggtttctgcgtccataagaatctaatgccgctgctgatctgacagcaggtggagctcaatcagtaatgggagtggtggggagcagctgtaaatgcagatgaagcttcgctggctcgcccaccactcacctcctgctatgtggccaggttcctaacaggctgcagaccagtacctgtctgcggccctggggttggggtcccctgctttaagccacctagtttgtagtcatttcttacagttgccacaggaaattgcctacaaagtcgcaaagagctttctcaacagaaagttaatcaaagatgcatactctatagaaacaggtatccccagtgagtctgctagatgatactcagcacctcacttaaaagacacccaggaatctcctacccattcctaagtttggacagtttttcctgacaattttagtctacaaaatgcttggaatatatataaagtaattcatagaaagtaagcattactatataaattttagtgatactactactcctcctactaattataataattatcatcatcatcatcatcaaccaccatcattattctcttttatcttcttggcttgttcttttcacttgatgggttgttttgagtgggaaccatgattctcttgactgacaggcttccagacccagtggaagagaataacgggattatgagtgggaactccttgggaacacccaggagttcaaggctgcagtgaacgatgattgtgccacagaggttggtgttttcactgttagctgtgagagtgcgaaggcacaagatgttagcagtggaagaccaaggtgtcagtgataggcttggggttaccctgcccttccagctggatatcttgagctgctgtggagatgcaaacagcataaaggacaattgaatggaaagatgtgtggttttcagtgaacgaatatcccggagagcgtgatgagggtgaaaaaatacttactcacaaatcccctgaacaggggaagcaaaggtggtattgccaagtgaaaatattttgtttaaaaaaaaaaaaaaagagtgaagtgaagaaaacctataggttgactaattgttgaaggtatggagtgtggcattcagcagcattttaagttaatctaggccagtggttttcaagggggtaggtggattttgtcatccaggggatatgtggcaagtctggagacatttttggtcatcgcagcggggagtgctattgatgtctagttggtagagagcaggactgccactaaagatcttaacaatgcacagggcagtttcttacaacaaagaattatctggccccaggtgtcactaatgctgaggccaggaaactcagctttagggtgagaattccagactcacagaatcagagtcctgtaagggaccttagcaagtgtgaggttctgtgattttcaaaggacatctttcagatcccacagggtagggggaggcgccaggagcccagggaccagagaggcagtggagggtgtggagggtggatctcgtggtgttaccacatcaccggcatctctctcctctgcaatgggtgttggtgcaaggatgagtatttctgctgacagaaatatataaagtaactattcatagtaagcattactatgtaagttttagtgatactactactactaataattaattatcatcatcatcattatcatcaatcaccatcatcattcccttttatgtacttggctggttctcttaacttggtgggttgtgttgagtgggaaccaatgattatcttgactgacaggcttccctgcccagtggaagagaataatgggattatgagtgggaactcctcagaacatccaggagttcaaggcagtgagccatgattgtgccacggaggttggtgttttcaccgttagctgtgagagtgcaaaggcataagatgttagcagtggaagaccaaggtgtcactgatcgtttcraggttaccctacccctccagctggctgtcttcagcagttgaggagacgcaaactgcacagaggacaatgaaatggaaaaatgtgtggttttcaatgagcaaatatcatggagggcagtacctagagccgggcatagtgactggcacctacagtctcagctactcaagaggattgctggagcccagacgttcgaggctgcagtgagctatgatcgcatcactgcactccggcctgggcaacaggccaagatcctgtatctaaaaaaacaaaaaaaaaggttgaaaataactagtgtgtttttattttgtgttgaggaataaaaaattaacagatgtggtcactaatagtaccgggaatcctggctgcctctggtgcctaagcccacccttcccaatgtctattcagaccttgttagaaaaacctatggggtttccaaccccatttctgcaaatcttgccgacatgcgacatgagctggtttaatttctgaccataaaaacacattaaacaggatacaataaaaagagtcctttctttgttaagaatcttattgatacaatttactaaggcatttaccgtgtctaccctgtacatggctgtgaacatttagagggtgtaggatttagggctaaaattatcccatctccgatatatattctggacactggagttttagataaatccgtaacttatgtttacgtctcttctaaacatagatggtgggaactggaaccagcgtgcttgtagctgggggagaaaaataaaggcacactggctgtgggaacatttatccttcctggtggctatggcaaacctgtgatcctatgatcactctccttatgtttggaggagtttccaccctctgagccccacctttgtttgttttgggttttttgttctgagacagtgtctcactctgttacccgagctagagtgcagtgtggcatgatcatggctcactgcagcctggaactcacaggctcaagcaatcctcccccctcagcctcccaagtagctggaaccataggcgtgccccaycatgcccggctaatttttgaatttttctatagcaatggggtctccctatggttgcccaagctggtctcaaactcctgggctcaacctatcctcccacctcaacctcccaaagtgctgggttatcaggggtgagccaccgcacccagcctgagtcctgcctttccaagatcaaagtaaaaaccagcttcactgcctcccttgtagctagaccatgtcctgggagccaggcttctccagtcagacccacaggaagggtggcttcacagacaaaggtctgtgaagataggggtaggaggaggatgaaaatgtatcatgcaaaacccatcctgatgacaagaasgagagacatttaactttgaaaggcaaaaattgtaccagtgttaatggcggcatctcatttcctgtgtggacaaagtggcagctggatttaggaaccctcttttgataaatcccttttctcygaaactagctcaatttggttctggagaccataagtaaaatcactgcctgatacagcaggagaaatgttactgtggaaatatctcagagaccaaatcacttggcacttcgcagttttgtgaaatactaactgtcaccatcagacaaaccttcactgctcccacctcctcagcattgcctgccctaattaggtgggttttggaagaactcactagcaaccataacctttaaatagaccagaaattgtcttttrcagtggattcagaatcagtagctttataagaagggctttgctcagttcatgatgactctatgcatgattgactccatctctgtacctgaattacaaaaaaaaaaaatgtggcaagtaaagaaaaggcaaaatgttatttttttccccactcagttttgcactggggctcagcacgtatggtttcaggtaggctctgccttaacatattcctggaataagcttcagaaaagaggctgtgacaggtggagacagcttccttgattatagctcagcatggttcaaaggacactctggtagttaattgattcaggcaagataatttgtgggcaataaacagcacagaccttttattttcaactggtcagttagaacgaagtttctctaattcagtcttagagaatgactttttttttttcctgtgctggaactcattcatttgcatatagaaagatgtttaaacctctgtagaaatgcccagagattgtaaaatctaacattatgtttgcaaagatggcatcaagctccttcctcctcagacataagaaaattgcatttgaacaggccgggtcttgaaaaccagctgatggtgtctgagtcaaagatggagctgatattctcaggcaatgggtccactttggggccactccagctgtttttctaggaaatcttccaaagcaaacaccacagtggtgctattcctgtgaaatggtggcacgtcttcttctgtgatcatggccagagacaacttctttctttgaaatacatgcaaaaggttttgctcagcctctggagtaaaccccatctcaacagagcagctctatcctttgagaatatgattttgacatctgatggactcccaatatttgatgcttgttttcaaggccacactaaccccagttgggctgagattaaaatgaggtccatagtaacagtcacgggtccacagctcttggagaccccctctttttttggagtcyttttttttttttttttttttttgagacagaggctctctctgtcactcaggctggagtgcaatggtgcaatctcagctcacttcaacttctgcctcctgggttcaagcgattctcctgtctcagcctcccgagtaactgtgattataggtgtgccccaccacacctggctaatgccctctgcggactcttgcacagtcctggccatgcctctcctgggcagggtctctgcagtcagtcctcttgtccaccagcttcatgctttccattttcctctcctactcatacgtggcatcctctgcaatgcctcgaacagccagtgcagtgcatggtgacttggtgacacattactgaccagagacactactgagctctgtcgctcatgtcacccaggctggagtgcaatggcacgatcttggctcactgcaacctctgccttccaggttcaagcgattcacctgcctcagcctcccgagtagctgggattacaggcatgtaccaccacacccagcaaatttttatatttttaatagagaaagggtttcaacatgttggccgggctggtctcgaactcctggcctcaagtgatccacccacctgggcctcccaaagcactgggattacaggcatgagccaccatgcccagctaaagccactgatttctgaagtcaaggatgttgtctttcatcattgccaaagtggctggtgccaaccccatggaggccttgtgctttcaaacctactagagattttcttgaatgagccctttcatgacagcccaggcaacacagagctacagagggagggaacctctgccaccagcctgtgaccataataagacaaacagaccacatcctgcactggctggcacctctcttctctaagtctggtccctggctttgccccaaactggtgcatttttcccaggaggcagcttggaatcccttacaaaaggccatttgacaagtcctctggaaagactgaccttagatgaaagctgggtgtgggccgggcacagtggctcacgcctgtaatcccagtactttgggaggctgaggcaggcagatcacttgaggtcaggaattcgagaccagcctggccaacatggtgaaacctcatctctagtcaaaaaaatacaaaaattagtcaggggtggtgggtgcacatgtgtaatcccaactactggggaggctgaggcaggagaatcgcttgaacccgggaggcagagctgcagtgagcggagatcgcaccactgcactccagcctgggcgacagagcgagacactgtctcaaaaaaaagaaaagggctgcatgtggtgggtggcctggccatatgtgtgctgggcctggctgaactacacttcccagaattctcttccttgtgtgttttccagtagagtggactgcaagagggatacctatgggagatgtggaaggtgcagggggaaacagcagccgctttgtagctcacccacattactgctcatctgctgcctccacttgttggctgggcctgctgcaactccacctgcccctggagcccctccaggttctcccacagctggactttgtgtggctgttggctccaccgtgaagggccctggcttctgcctgacacgaaacccaaggtcagaggcaataaggcacttcgacaagtttcatttgtactcctgggctccagcttaagtttgtgggtttcagcttgttcttgcttgcttaggttatagccgtcatttccccttcctggctgtcttccctgtggactgcagctgccagcatcagaaggaaaggaaagaaggaaagacaaagtcagttctagagactgcttaaccagctcccacagttgcatgaggtcaaatccttgcaaaaagtcataaaagtgatatatatgtgcattgatgtataggtatacatatatgtatgtgtgtgtgtgtgtgtgtgtgtgtgtgtgtgtgtgtatgtatggtcatgcattgcataatgacaaggatacatttttttttttttttgagacggagtctcgctctgtcacccggtctggagtgcagtggtgcgatctcggctcactgcaacctctgcctcccgggttcaagtgattctcctgcctcagcctccagagtagctgggattacaggcacctgccaccacgccaggtgattttttgtatttttagtagacacagggttttgccatgttggccaggctggcctccaacgcctgacctcatgtgatctgcctgcctcggcctcacaaagtactgggattacaggtgtgagccactgcacctgccgacagggatacattcaaagaaatgcatcattaggcaatttcatcattgagcaaacattatagagtgcacttatacaaccctaagtggcctagcctattacactcctagcctgtatggtaaagcgtgttgctcctagaacaagaacctgtagagcacgttgctgtactgaatactgtaggcaattgtaacacaatgctaagtatttgtgtacctaagcatacctaaacatagacagggtacagtgaaaacatggtataaagcagcagcccccaatctttttagcactaggggccggttttgtgaaagtcagtttttccagggctgcagggaagggtggggaggtgtcaggatgaaactgttccaccttagatcatgaggcattacttagattatcagaaggagcatgcaccctagatcctgcacatgcgtagttcacaagagtgttcatgctcctatgagaatctaatgtcactgctgatctgacaggaggcagagctcggtgggtaaggcgagtgatggggagtggctgtaaatacagatgaagctttgctcgcctgcgggccgctcacctcctgctgtgcagcctggttcctraaaggtcacagatcagtactggtccaaggcctgggggattggggacctctggtataaaagactaatcatgcacctgtctaaggcacttaccatgaatggagctcacagcactgaaagttgctctgggtgagtcagtgagtgagtggtgagaaaatgagtggttcatgcctgtaatcccagcactttgggaggccaaggcaggcggatcacctgaggtcaggagttcaagaccagcctgggcagcgtggccaaactctgtctctattaaaaataaaaaatcagcctggcgtggtggcaggtgcctgtaatcccagctactctggaggctgaggcaggagaattgcttgaacccgggaggtggaggttgcagtgaactgagattgtaccactgcactccagcctgggcaacagagtgagactccttccaaaaataaaaaaggaaagaaagaaaatgtgaaggcctagaacattactgcacactactggaggtagactttgtaaacactgtatggttaggctacgctattttttttgagacattgtctcactctgtcacccaggctagagtgcagtggcattatctgctcactgcaacctccacctcctgggttcaagcaattcttatactaatttattctttttaaaatcccttcttcagtgacaaattaacctttgcttactgtaactttgtaactttataaaggttctaattttttgtaaatttttggacactctgacagtaatcacttagcttaaaacacattgtacagctgtacaaaaatattttctttctttatagctttaatctataaactttttccaactaatttttttttctctttactccctaaaaacgaagacacgaacacacacattagcctaggcctacacagggtcaggatcgtcaatatcaccatcttccaccttcttgtcttgtcccactggtaggtcttcaggggcaataacacacgcatggagctgtcatctcctatgataacaatgtatttttcttgaatccctcctgaargacttgcctgaggctgttttacagttactttttgtataaatagaaggaacacactctaaaataatgatgaaagtatagtgtagtaaatacagaaaccattaggtcttttactatgattgtcaagtattatataccgggccagatgcggtggctcatgcctataatcccaacactttgggagactgaggcgggcggatcacttgaggtcaggagttcaagaccagcctgggcaacatggcgaaacctcgtctctactaaaaatgcaaaaattagctgggtgtggtggcatgcacctgtaatcccagctactcgggtggctgaggcaggagaatggcttgaactcaggaggcagaggctgcagtgagatgagatcgtaccactgcactccagtctgggtgacagagtgagactctgcctcaaaaaaaaytagtatgtattggacataattgtatgtgtgatacttttatgactggctgatgagtagcatcaccagcattgccacaaacatgtgagtaatgcattgtgctatgatgttatggcagctacgacatcattaggtgataggcattcttcagctacattataatcctgtgggcccactgtcctacatgcaatctgtcattaacccaaacttcattatgtggtgcatgactgcatatataggtttcctattggttttatttctcaggttgaacccagactgatacactgggaacccagcatcaggatttttttttttttttttttttttgacagagtcttactcttgttgctcaggctggagtgcaatggtgcaatctcggctcactgcaacctccacctcctgggttcaagcagttctcctacctcaacctcccaagtagctgggattacaggcatgggccaccacacctggcttttttttttttttttttttttttttagtagaggcaaggtttcaccatgttggtcaagctggtcttgaactcttgacctcaggtgatccacccacttcagcttcccaaagtgctgggattacaggtgtgagccaccatgcccagccaggatttttttttttaagacagggtcttgctctgttgctcaggctggagtgcagtggcaccatcatagctcactgcagcttcaacctcctgggctcaagcgatcctcctgcctcagcctcccaaatagctggaactacaggcatgcaacaccatgcccagctaatttttgcagagatggggttttgctgtgttgcccaggctggtcttgaactcttgggctcaagcaatcatcccgccttggcgtcccaaagtgctgggattacaggtgtgagccaccacacttggcattgtcaggcatttttgttcttctagtcttaggtcttacttggcctgtgctttcgattctatcccaggagtgccagtcctagcttctgactgcccatcctggctcagagttcattctttagaaagtgtctcatggcaggtccttgacctgtggtgccatcactgagagatcacctggccacctttcacccagacactcccacagcttagtgcagatggttttgaggatatccactgtatctattccaattttctgctcaagaaatacctcttattctacacagttaaggagcaagacagctaagacatggtttatggccttgtcattcgccatcattgtagcgccctcagacctcctgtgggttctgacatttaaaaaattcagttgtaatccatcctctgaaatccatcagtctgaaaaggctggatgaatattttctttgtcaaccagaaattgtgtaagctatatagtcagatacaaggaggcagtgcccttttcttaaggaattcataatctaattgttacgtttctctgattggagcaaaatggtgttttactgacccagattttatgttattcaaacaaataaagctccagctaccaatttcaaaagagccactggacttaatgggcatttaatatatttcctcggccaggcacagtggctcatgcctataatcccagcactttgggagactggggcagggcggattacttgaggtcaggagttcaagaccaacctgggcaacatggcaaaatcccatttctactaaaaatgcaaaaatttgccgggcgtggtggcacatgcctgtaatcccagctacttgggaggctgatgaggcaggagaatcacttgaacctgggaggtggagtttgcagtgagctgtgatcacaccactgcactcccagcctgagtgacagggcaagagcctgtctgaaaataataataataataataataataataataataataataataataataatagtaaataatatatttcctccctggtcttgacttcatttgcagtgacagattctcatgacttcctggattgttgagactttcccatgtgaaccatagttcattgcttctcacaacagcagacagctcttggtgctccacagtgctgtaggggcgctgtgacacatgccgaagagcctctctcttctggaccaaggtactcaggccaggcatgatggttcacacctacaatcaaaaggcaggcggattgcttgagcccagcagttcaagaccagcctgggcaacatagtgagatcccatctctacaataagtcaattaaaaaaaaaaaagccaagcatggtgatatgtgcctgtaagtccacctactcaggaggctgaggtgggaggattcccgaagcccaggaggtcgaggctgcagtgagctgtaatggtgccattgcacttcaacctgggcaacagggtaagaccctgtccaaaaaaaaaaaacaaaaaaaaacgcacttcttrctcctgytggtggattgttgcctgttgacagctcacagccaagttcctccctaagtattgagatgactgcagggtgctgccctgcctgggatgatgcacttcccaattatgtccctcctcccttgacttttcagtgtgggacacgaagcttcagcaaccctgcctgattcaggacatctctgcagggcagctgtgcgtcagagctccccgaggaactggctgaggcatctgttggaattgcatcatttttcagtgtctcctctgatcagtctgcttccctcactccctgtacccaaatctccatttcagagcttgctgccagggatggggcctatgacaagtgtctccatgagggtagtgatgtttctcctcctttgttatttcccagggttttgctaagttgtctggaggaggaaaaacatgggtttgttcttaatccttcctcggcttacttgatatagaatggagaagaccaggagcaactggaagctggaaacaagagcagatgagtcagaagtttggagacaggcaccaaaaagtccatccagcgtccagggaatagttgagagttaaacaccaagaagagtcaagccaagcctggatgagtcaggtcatgcctataatccctgcactttgggaggccatggtgggaagattgcatgaacccaggagtttgagaccagtgtgggcaacatagtgagaccccatctctataaaagaattaaaaataaaaattagctgggtgtggtagtgcatacctgcagtctcagctactcaggaggctgagacgggaagcagaatattacagaattatagtagtattaaaaataatggcaaaacccacagttacttttgcaccaacctaatagtagtgataacagggtcaggaagtgagagaagccagaaccatatgacatcctggtccaggtactggcctagttgtgaaattgccccacatataggtggccagccatcaagatcccagttttggagcygggcatggtagctcacacctataattccagtgattcaggaggctggggcaggaggatcacttgaggccaggagtttgagaccagcctagacaacatagcaagagaccctgtctgtataacaagtttaaaaattaactgggcgtggtggtgcatgatggtagtcccagctactcgggagaccaaggcggaaggatcgcttgagtccagattccaagctgcagtgagctatgattgtgtcactacactccagcctgggcaacagagcaagaccctatctcttaaaaaaaaaaaaaaaaaaaaacagccaaggtaagaggcaagccttagacagtgcgcccaagaaccaatgagataaggagcccagggatagacttggtggagattatgggatgtctgggcaggcaagctaatgagggctcatagcagagagcaaggcccagcatcccatctgcctggagtacagcgtagtccttccagtctttgctgtggggaattgtcaaggaacttcctggacaaaaatcaccttctgcacagtgagcagaatgggaccccgttgctcattagaaacacaacctggagtggagtttcttaaatgggaatggcatcaggattgtctggagggcttctaacacaatcccagctccacccccagatattcccactgggcaagccaggacttgcccttcttttttttttttttttttttttggagacagagttttactgtattgcccaagctggagtgcagtggcaggatcttggctcactgcaacctctgcctcctaggttcaagcaattctcttgcctcagcctgtgagtagcttgggactacaggcgagcaccaccacaccccgctaatttttttgtatttttagtagacacggggtttcactatgttggccaggctggtctcgaattcctggcctcaagtgatccacctgcctcaacctcccaaagtgctgggattacaggcatgagccaccgcgcccagccaggtttcctttttttttttttttttttttttttgagacagtcttgctttgttgcccaggccagagtgtagtggtaagaccttagctcactgcagtctctgcctcccagattcaagcgattctcctgcctcagcctcccaagtacctgggactacaggcgagcaccaccacacctcgcaaatttttgtatttttaggagagacagggtttcactatgttggtcaggctggtcttgaactcctggcctcaagtgatctgcctgcctcgacctcccaaagtgttgggattacagacatgagccactgcacccaaccaggtttgtctcataatcaaattctcaagtagtgcagatactgtggctctaggrgccacactctaagaaccttcagatgggtcagccggacacctacacctgactatcgtcttaaaatgcttcattcacacccagctcttataggggaggacagatttaggcctggaaacctgagagaagatcaggagattcagacacaacacaaattgataatgatcaacaggctttggcctcagctatttgccatggtaagtgacttaactgttctgagcctgtgtcttcatctgtaaaaagaggataagaaagctatcacataggattgttgtaaggattggataagagatcaagtgtggaaggtgttagctgatgtgagactgttgtgctgaacccctattaacctcagaagggagagccccaggctcaagagcctgaaggagagacccagcaccagccaacgagacatgggattttactagaggcttacatacaggggagagagtccattggcggcgggctgggcaggaaaactgcaaccgcctgcaaacatcatgtagcttatacagcattttcacttaacacccttccctcaatgacctccacctgacaacgttcatttaaccccaaattcagggcctcaatctcctgtatggctgggggctcagatgttcatcatagataaggaatgaatctctgcattggccacgctgtgtaatcccagcactttgggaggccaaggcgggaggatcttttgagactaggagtccaagaccagcctgtgcaacatggtgagactccatctctactactgcaatcccagcactttgggaggccgaggcgggcagatcacgaggtcaggagtttgagaccagcctggccaacatggtgaaatgccatctctactaaaaatacaaaaaaatttagctgggcgtggtggcggcacctgtaatcccagctactcggaggctgaggcaggagaatcatttgaacctgggaggcagaggttgcagtgagctgagattgagccattgcactctagcctgggtgatagggcgagactctgtctcaaaaaaaaaaaaaagaagcatgatctggaacagtattcatggcctggtgatctctgtgcctgttttcgtctctttcttcaccccggctctgaacatagattcaggtgcatctgccatacagggtcattcttagggtatgctcaagttattcctatcaggggcatttagcctacagagacccccttaagtgtttgttgtgcatggtggggacacacacaggcagtggggaacagctctagcaagtgaggccagactagttggtgttctctgggcaagggcactttgggaggctgaggcagaagggtcccttgaggcctgggcaacatagccagatgccatctctacaaaatataaacaaattagccaggcaaggtggcatgtgcctatactcacagtacttcgggaggctgaggcaggagaatcccttgaggccaggagtttgagaccagcctgggcaatacagcaagcccccatctctacaaaatataaacaaattagccaggcaaggtggcatgtgcctgtactcccagtactttggaaggctgaggcaggaggatctcttgagcccaggagttcgaggcagcagtgagctatgatcacaccactgcactccagcctaggtagcagaccctgtctctttaaaaaaaggaaaaatgactgggcgtggtggctcatgcctgtaatcccagcactttgggaggccgaggcaggcggatcacctgaggttgggaattcgagaccagcctgaccaatatggagaaacccccgtctctactaaaaatacaaaattagccgggtagggtggcacatgcccgtaatcccagctactagggaggctgaggcaggagaatcacttgaacccaggaggcagaggttgcagtgagccgagattgtaccattgcactccagcctgggcaacaagagcgaaaatccgtctcagaaaaaaacaaaaaaaagaaaagaaaaacacaacattttgcccttctggtgctctgggttctgtctcctgctcatgctccctgggtcttcatggcactattgagtagctggcagtgacggggtaggagtggtggtaccagcagccttcattttttcctagacaggaatgtaagaagcaggcacgacgccttctctccaacagttgcattttacagcttatgatttatagcgaggtccatcatggcagggaagcacacaccattatttatgtgtttgtaccctgccttgttccaaggaagatttaaggcagctgcagaccccggtaaattaatccactatctgtgcagtggagagaggcagggttcccatatcagcccggataggttagcttgctgaagtggccttagcggcagactccagtccatcctgatgcaatcagaagagaatttggatctaaaccagctgttctcaaacttaagtgagcattggagtgacctggggaacttgttcagcacagattggtcagtttctgattccctaggtcaggagcaggcctgagaatctgcatttctagcaagtaccaggtggtgctgatgctgctggcctgggagtctcactttgagatgcactgtcctacggaaattcatgctgtgattgtccttctggaagcgtgaacttgggccaggctcagtggctcacacctgtaatcccagcrctttggaggccaaggtgggaggatcgcttgagcccaggaattcaagaccagcctgggtaacatggcgagagtccatctcaaataaaataggctgggcacagtggttcacacctgtaatcccagcactttgggaggccaaggtgggcagatcatgaggtcaggagatcgagaccatcctggccaacatggtgaaaccccgtctctactaaaaatacaaaattagtcgggcgtggtggcacatgcctgtaatcccagctactcgggaggctgagataggagaatcacttgaaccagggagtcggaggttgcagtgagccgagatcacgccactgccctccagcctggagacagagcaagactccgtctcaaaataaataaattaattaattaaattaaatatgaataaaatggaggcatgatttggaatagtgttcatgtgttcatgcccagtgatctctgtgcctgttttaggttctctcttcacccctagagctgctaggagcctctcacttacacccaccttcctgagatgcatcctgtgctagaatgtgccagacttggcacccatggaaatgctcttttctttggctgtcactctcatggtcttgcaaggagccactatcctcattcaaccataatctaactaaggcatctaatgggtggctttccctggtggaggagaagagagaagcttaggtggcaggtggacttgagttcaaaagtaaattggccaaagtactcatgtgaaagtgagcacgtcactccagttctctcagtttattaatctgtcaaatggagacagtacactttcgtagaaccgttgtgagaatgcagttggacaatagagtgtttgaygtatcgctgttctccatcattattcccttttcctttcgaaatacattctcatggatccttgtcttgaaggagtgacctggatggagagtttgggggtggattatgatggaccagagaagtagctgtggaagatttgggggccaggggatccgctatttagcattctttaattcacatgctatgaatggtccctctcagcccttagatttctacttgtattcaaataaattgcacagctaaaataaagaactattttagtcaaaatggtcagttttcagaataaatagttttgatgtatgctacagctcatgcataaattcagacaggtagtagactgtcaggctggggacacagagatgaatggagcatcaccttgtctttgaagagctcacagtctaatgctcaaatccagccagtgcctttcaaggctctcctgggtttttcctccaggacagtgagtgtaggcatgggctcctctacccagcatggttctgccaggcatctgtgatgttgccccagttatctggatgttcttgactgggccccagttcacyttcatattgaagaatcacgctccctggtaaagagaaggaaatgagttttgattggtgcctgtgttagtccattttcacactgctgacaaagacatacttaagactgggtaatttataaagaaaaagaagtttaatggactcacagttctacgtggctggagaggcctcacaatcacggtggaaggtgaaaggcacgtcttacagggcagcagacaagagagaatgggagccacatgaaagggaaaccccttatacaaccatcagatcttgtgagacttgttcactatcatgagaacagtatggggaaaccacccctatgatccaatgatctcccccagggatggtccctcccacaacatgtgagaatgatgggagcttcaattcaagatgagatttgggtagaaatgcagccagaccctatcagtgccttttcttcccttctgtcccctccacttctccatccttctcytcatcatcccatctccttgcctgtctttacctgtcctctctgaacaatgcaaatatttccatttaaatctattatatgttctctttctctctctaataaacatactttactgttgatgggattgatagatgtttcaggttacttacttgcagagaagaaggaagtctatcagcttttataaagtttttttttaagaggcagggtgtattagtccattttcacactactctaaagaaatacccgagactgggtaacttgcaaaggaaagaggtttaattgactcacagttccacttggctggggaggcctcaggaaacttatgatcatggcagaaggtgaaggggaagcaaacttgggacttctcagatggcgggaggagagacagtatgtgtgtgaaggagaaactgtcaaactcttagaaaaccatcatatcacatgaaactgtcacaagaactgcataggggaaatcaccccatgatccaatcacctcccaccaggcccctccatcaacacgtggggattatggggattataattcgataagagatttgggtggagacacagagccaagtcatatcacagggtcttgctctgtcacccaggctggagtgcagtggtgtgatcatagctcactgcagcctcaacctctgtggttcatacgatcctcctgcctcagcctcccaagtagctgggactacaggtgtgcactagcacacctggctaatttttgtattttttgtttgtttgttttgtagaaatggggcctcactgtattacccagtctggtcttgaattcctgggctcaagtaactctcctgccttggcctcccaaactattgggagtacaggtctgagctactgtgcctcacttgtcagctttgtgataaagcagagagaagctgtattagtctgttctcatactgctaataaagacatacctgagactgggcaatttataaaggaaagaggtttaattgactcagttccacgtggctggggaggcctcacaatcacggctgaaggcaaatgagcaaagtcacgtcttacatggcagcaggcaggaaagcttgtgcgggggaactcccgtttatacaaccatcagatcgcgtgagacttactcactaccacaagaacagtatggaggcaactgcccccatgattcaattgtctccacctggtacaaatcaaggtgagatttggggccaggtgcagtggctcatgcctgtaatcccatcactttgggagactgaggcaggtagatcacctgaggtcaggaatttgagaccagcctggctaacacatagtgaaaccctgtctctactaaaaaaaatacagaaactagctgggcatggtggtgcacacctgtagtcccagctacttgggaagctgaggcaggagaaatgcttgaacccaggaggcagaggctgcagtgagctgagactgtgccactgcactccagcctgggtgacagagcaagacaccatctcaaaaaaaaaagaaaagaaaaggtgaggtttgggtggggacacagccaagccatatcagaagacaagcaaagacactgtactccatattctgtgataatagcaatgacaaccatagcagttttcttttttgagcacttaatgtgtgccaggcattgtgctgctaacatctgtctatggattagtaacataattaatcaaaataacctcggtggggaggcattattattatcattatttttattttacaagtcaggcagaaagaggttaagatagcatgcccaggactagtaggcaacagagctgaatttaagtgcagggccgaggtctgatccccagtggccaggcccctaatgactgatctcctgacccggcctggaatgggagcactataccttggctcattcccagtaactggaggatgcttgatggtcacatgtagaggctgatcattcctctgcttgaattgggcatcgtaataatgcctttcctacatatcatggccactttcccttcctgtctccaattgtatagggaattgcaggrtagggaagagaggactccaggagtatctgattttggtctagagactgataaaaatgggaagtccagggatcagcaggtgccaccagggcrgatgtaaatgatgtccttgagaagcaaagaatattgagagtccagcctgccaaggttcgtgatgtccgctgctgcccacccctgctgttgctgatattgaatggcaaggccagaaggcatgggaacaccatctgtgggggctccagcaggaagagaaagcmctgggaacccatgtgctcttttcgtcctacagatggtcgagacttagagagacaagaacagccccaatgtactattattttagttgccctgtcttagttgcacagggaagaggacttcagcagctcccaggacttgaatgtgaaggaccctgcagtggggaggccgggggatcaagggaatccccaggtggcagaaggggccagcagctgggagccaggccccagagtttgtgctggctcaaagcatcagtgggccagttggagacygggctgtcttactctggtgggggtggggagacatctttagcatttgaggggagcatctttctagagaaacagcagggcataggacctgtttggtggacctcacgtattggtgaggtcactagccacaggttgaaccaaaggaagtcaaaatgaggacagagacccctctccgcacagacatcgtccagtgacatagaaatgatctccgccttcctttccacctgccctccttccccgaagcccaacctgaaaggagtggaggagagagaccatgagggagggtgaggaggaaggcactacagaaacagacagcaccctctttcctgtcctaagcccccagctgccctgaggaagcataagagccatgaaaacagagtgagttcagtgttctcaattgaaccggcctaaatatcaatcactgaaaatgacctgggccggatggggtggggtggggagcggggggcggagcacttacacctgtaatcctagcactttgggcggccaaggcaggaggattgctcgaggccaggagtctgagaccagcctgggcaaagtagcgagaccatgtctatacaaaaattaaaaaaaaaaaataaccaagtatgatggcatgcacctgtagtcccagctactcaggaggctgaggcaggaggatcacttgagcccaggactttgaggctgcagtgagctatgatcaagccactggtgacacagtgagaccctgaatctctctctctaaaagaagaaaatgatctgaaagttaggaaaatgatctgaaagttaggaaatttgtctagggagggagatgtgggtcctcatcctctaactgggagccaggactggatacatttgacatttgtatctgcaatgagctgaccttcttctgtgcactaatccactaatgctgccataacacacattgtgcaaactgtgtgccatagcatagattgagtggtttaaacaagaaacatttattttttcacaactctggaggccagaaatccgagatgagcatgcaagcagcgttggttctttctgaggcctctctccttggcttgtcgaaggctgtcttctctctggggcctcacagtctttcctcagtcacattctgggtgtgtctctgtccatttcctcttcttttaaggacagtgagcacaccgaattacggcccactctaataccctcattttaacttaattatctttttaaagaccctttctccaaatacaatcacattccagggtactgggggttaggatgtcaacatatgaatgtggttacaggggacaggatttagcccatgacagtccattaaatgtaagtccactgtgtgcttacatggggaagtgtgctattttcctggagcacatgctgcgtgcagcctgccaaggttcatgacgtccactgctgcccactcctgctgttgttgctgatattgaatggcaaggccagaaggcatgggaacaccatctgtgggggctccagcaggaacaggaagcactgggaacccaggtgctctttttgtcttacagatggctgaaacttagagaaacaagaacatccacaatgtactattattccatgaaaagggcagtttgcaaaaccgaaagtacagcatgattggattttaaaagaatgtttttcaaaaaagaaaaagaatatgtgtatgcacatgcgtgtgggatcatgccttttctctgtgcaagcagagaattcagacgtgaatgtccgcagtggggtagcagaggttattcctgaaggcgggaagatgggtgactaccattttaacaatttattgtatttgctacatttgctacaatgaatttgttacttttgtgatataaaagagagaaagagggctgggcacagtgtctcatacctgtaatcccagcactttggtaggctgaggtgggcggatcacttgagatcaggagttagagaccagcctgggcaacatggtgagacccccgtctctactaaaaatacaaaaattagccgggtctggcggttcacgtctgtaatcccagctgcttgggaggctgaggtaggagaatcacttgagcctggtggaggttgcagtgagctgagatcataccactccacaacagagtgagactctgtctcaaaaaaataaataaaagcaacaacgaaagagagaaagggctatgtaatattggaaagaaacaggaggtgaatgtttagcrtcatagttggagtcagtgaatggaatttggatttctgagccaggatttaaaatgtcagattcatgggtttgggagtactgaagagaatcaagtgtacaaggaggagatgaacatttgcccagagtcaagatggctggaatcagaagatctgaatatgactggggactggggagtagaggacgctttgttgtgtctgtgaagcatcacattaagagcaactgggctgcctctgaaaaccctggagaagaatgttcttgcagaagccagataactccatcaaagagatgaatagggttgaaatagatgacatttaaggtccttcctaactctgagattctgtggttttgtgaaaatgtagaagctctgagttaagctacctttgaggacatggtgacatttaatgctaaaagcatctgttgatgttttctttgaaatctgcattgtgccaactccacctgtaaggatgacctgcaggacattggaatattttgtgaatctccatagcaactctttcagcagaagtattttctttggatgatctgaagacacaggacagcgaagcatttttttttttaaatctccatacctcatgtccaagttaactgctatttaattgaatggcatttcattctcagaccgtcatccccttacctgaatgttaatattcttacctgcaacaaggcccctattggggcagggttggggagtggagtggagtcatgatttactggtattttgcatgaaccaataacatttccaaatcccatcactttgagaggctgagatgggaggatcatatcacttgaggccaggagttccagaccagcctgggcaacatagcgagacctccatgtctacaaaaagtaaaaataaaatcacatttctaatctcagatgatgttgatttgtagacattattgtaagtgggagagactcagtgtaacctgaacctagtacagtaaagtgtaggctcagatcacagtgagaggaaataccacatatagcagcattttcattaatgatacgattgttttataatgagtgctccaaagattccagggaaatgcttccttacactcagaatgtgttgcaaagaagactgttttctctggcctccatctgcctgaaatgcactcccgatttctcttcatctatacagattttacctgctcctccggagccatttctaatccacattcttcctccatcaagccaacactgactcactgatatggtttggctgtgtccccccacaaatctcatcttaaattgtagttcccatgatccctacatatcctgggagggacccagtgggagataattggatcatgggggtggttacccccatgctgctgttctcatgatagtgagttatcacgaaatctgatggttttataaggagcttttcctccttttgcttagcacttctcctgctatcctgtgaagaagaatgtgtttgcttctccttctaccatcattgtaagtttcctgaagcctctccagccatgcggagctgtgagtcaattaaacctctttcctttgtaaattacccagtctcaggcagtcctttatagcagtgtaagartggactaatacactcgtccatcccaattgattgcttttgcctataaatttcctagagcaattattgacaattaattgcaccgccttgccctgtctcccttattacagtcttgaatgactattaatgtctattttgtatgtttgtgtcctcccatagtgtttagcgaagggctccaaaaacagcaggcactcaataaaggttctctgatttattcagaagaccactgtttgttgactgcacgatgattttgaactcagctgaggcagaccctattcgtggtcctccttgatcctccacctaccaccatcatgagtgactttggtgtctacaaagatgttccttctaacacactggtctccccaggtctcaacttcctcctctctgttggcctcctgcatttgttctcagccatccaatcttatggctacacctccagagcttgtcattacctgcaaagcagtaactcagacactcaccccctgccacttccttgcttgtcccactggctgtcctccaagcatcctttgctggcatcagaacctgcagcacattactactctttcttccagggctctttcctttcatcactttccccttatcttttagattccggggaccctcactgcagggaagatgggctctgatcaccaaccccaagtggccgttcaccatgtggccatggttaagacaattcctaccaccatagtaagagccgtagtttagccactcctccaaacccctgtcctctcttctccccctttaccatatcgatctagtttagattccagggctcatcatttcaatcattcctgtgctcaatgctcttgttccactgtctttttagtttatttatttatttttttgagacagattcttactccattacccaggctggagtgcagtggtgtgatcttagctcactgcaacttctgcctcctggattcaagcgattcccctgcctcagcctcctgagtagctgggattacacgcgctaccaccatgctcagctaatttttgtatttttagtagaggcagggttttctcatgttggccaggctggtcttgaactcctggcctcaaatgatccatcctcctcagcctcccaaagtactgggattacaggtgtgagccaccgcgcccagcctagtttaattttttgagacagggtctctttctgtcatccatgctggagtgcagtgctgtgaccatggctcactgcagcctcaaactcctggcctcaagtgatcctccagcctcagcctcccgagtagctgggactacaggcatctgccaccatgcctggctaactttaaaaaaaagatgtgtgcagatggggttttgctatgttgcccaggctggtctcaaatttctggcctcaagtgatcctccggccataaccttccaaagtggtgggatgagaggtgtgcaccatcatggcttccctcctctgtctttttgttgtatacaaatggcaggatctcaaccctagatgggtcttctctggccaaaacccatgtcctgagtgttgatagggactcttagtgcagggcakacaggctctgatcaacaccccaagcagccctgccctccactctggccatggttaaggaaatgtttacagtcatatagagtgtcacacagttttgctactcccccaaacatctgtccttccttctccctctttctcacaacaaatggctgcatcttccattgcacagaggaagcaggagccatctctcaggaatctgcttgtcctcagggtggcaaagacaaacttaaagattaccatcctccccttcttccctcccatttcactagagaagccctgtctcctcctaagcccgacccttcagctgcactcagattccattccatgtctttgtagttttgcactgtttatggataatcccttaactctcctgtttattcaacctttccctctcaaatgaatctctcccactggcctttcaacatacgcaggctcttgcattaaaatcaaagcaaaaagaagcaaattaatttcatatttgccagcatctactctcttgccccttatgaccaatcttcacaacctgtgctgtgtctattcctcaccacccattgatttttgcagcaaattcttttccaaagttaatcacattagtatatcccatctttcacagtcttgttacgtgtgatgttgacactttctccactgagagatggggtcacattcatcggaattgggagaatctttgttatctcagccaatggaatatggtggaatgaggtggttgctgcctgaccttctgggtttaggtcatcctttaacatctgtcagatatgtccttcttcacatgatggcaggaaggagaagcactgagcaatacggtgtgtgtatgtctctctctccctccatgcatcttgggagccttgagccaacatgtatgaaggatggcttcctcaaagccaccatgctgggaagaccatgtgaacaggaactatagacacagaaaatgatgcccaaggagctcctggtgtttcaccctcactgtttcartcttcccagtgtcaaccacggatgtgaagaataccttagatgatgccagcacccagccttggagtcacccatctcagactgagtagaacagagacaaccatccttactgagcttgacccccaattgtagatttgtgaacaaatatattgttttcataaactaagtttacaataatgtgttccacagcatgaagttgccgaaacagcctctgacttcaccccaggatatcagtttgccccatcaagtgcttgagatggctcttaataggcacaccgtgttactaagtcagacattgttgaaatgtctgctttcttggtcattagccccctgcactgttgatcacccaccctgaaatactgattccttggtatccactgtattaccctcatctggactttttcagcattcttcttacttgttgggctacttttttccccatgattctgtccacagctattaaatgctgaaatccttcaagactcacacctagacttccttgtcttctcactccaagctttctccctaggcaattccctacacgatcacatgtcaatgatcacttctatgcatgagtcataatttacatcacttttctgagccagggtctcgctctgtcacccaggttggagtgcagtggcgtgatctcagctcactgcaacctctgcctcccaggttcaagctattctcctgcctcagcctcccgagtagctgggactacaggcacacaccaccatgcctaatttttgtatttttagtagagacagggctttgacatgttgaccaggctggtcttgaactactgacctcaagcgatctgcccaccccggcctcccaaagtgctagaattacaggcatgaaccagtgtgcctggcctatatcacttttctgagctcctgacccatagatccagtttcctactgggaattatctcttgggaatgtcaaaggtacctgaaattcaatgtagccaagatttcagtactgtattcctctttctacctggtctgccttgcaggttcatgagagtgtgttattgtccaggggtaattctacccagtgttttagtgagacagatgatgttcctgccttcctggagcttttattctaggtacttagaacagatagtcaaaatacataaatacgttaataagggctgggcaccgtggctcacgcttgtaatcccagcactttgagaggctgaggcgggcagatcacgaggtcaggagtttgagaccagcctggccaatacagtgaaaccccgtctctactaaaaatacaaaaaatggccaggcgtggtggctcaagcctataatcccagcactttgggaggccgaggcgggcggatcatgaggttaggagattgagcccatcctggctaacacagtaaaaccccatctctaccaaaaatacaaaaaattatccgggcatggtggcgggaacctgtagtcccagctactcgggaggctgaggcaggagaatggtgtgaacccaggaggcggagctgcagtgagccgagattgtgccactgcactccagcctgggtgacagagcgagactccatctcaaaaaaaaaaaaaaaaattagctgggcttggtggcagacgtctgtaatcccagctactctcgggaggctgaggcaggagaattgcttgaacctgggttgcggaggttgcagtgagccgagatcgtaccgctgcaccctgggcgacagagctagactccgtctcaataaataaataaataaataaataaataagtgaactaaaagagggtgacaaacagcagacagtgaattagacaaaggtaatttgtcaaatttgctgtctgctatttatcactctcttttggtttacttatttacatattttacatagtttacttgcatattttaattagtttacttatttacatattttgcagtttatttacatttttttacctagtttacttatttacatattttgcatagtttacttatttacatagtttacttatttacctagtttacttatttacatattttacttatttacaaattacctttgtcaaatttgctgtctggtatttttcagtctttcagtttacttattgggcctggcatggattcagggcagtgtcagaaaataccctgaattctgccctctctctgtggcccgtcacctctcaatgctacgtcctgaatagctctcagatctctctatgcacctctgctgcagctacccgaggtcataccattgtcatctctcccctgggtctctctgctgtagcctttgaactggtttgctttcatcccctcctgacattctccagcatatatcccacactgcaatcttagggcaarttggatcacaccccacacgctgttgtgtgcatacactrcatcatgtagtggcccctccttgctttataggattaaaagtctgatctcttacttgacccacagaacccagtgtgctctggtcttttctttctctttatccccaatttgaacagtttcgcttctcttccacctcgtggccttcctcctcttcttcctgccacatcttccccaggccacaggacctttgcacgtgctagtcccactgttggcatctcatatcttccctctcctgccagtgaattacttctcatccctcagaagtcagctctcctggggccaggcacagtggctcacacctgtaattctaataccttgggtggctaaggtgrgaggatcacttgaggccgagagttcaagaccagcctgagcaacatagtgagaccccatctctacaaaaaaatataaacattagccatatggggtggcacatacttgttgtcccagctacttacgaggctgaagtgggaggattgcttgagcctgggagttcagggctgcagtgagccatgatcttgccactgctctccagcctgggtgacagcgtgagattctgtctcagaaaaagaagtcagctctcctggagaacctcctcggcattcctgaagaggtcccattaccccattatgtgctcttggaaggccatgtgcttctcctgccatgtccagcttcagtgattctgctgttaactatgtgaatatttgagtatattttccccttcaacacaagcccttggcaggctctttataagtgcctcccctcagagaacttatttaaaaaggtgagaacagaaagagaagtaattacttctgcttttggggcaccaagcatttagctctctgattgtccagcccaacatttctcttagctccataataagcttcatatacacttgagattcagaagccacaggccccattgtgttgatctctctttctctgcctcttggctacagcaaaaccaagactcaaaaccaagggagaagtatttctttgatacacaagtttctttcctttggataaatacctagtagtagtggcattggtgggtggtatggtagttctgaccattacaccttctatgcatgtaacaaaatatcactaggactccatatgtatttgcaaatattatgtatccataaaaaataaaattggaattcacagttctaaaatcaaacaggaggacactagctggggcatagaaggaatttttattttattttattttattttatttatttattttgagatggagtcttgctctgtcgcccaggctggagtgcagtggtgcaatcttggctcactgcagcctccgccttctgggttcaagagattctcctgcctcagcctcccgagtagctgggattacaggcacctgcccccacgccagtctaatttttgtatttttagtagagactgggtttyaccatattggccaggctggtctcaaacacctaacctcaggtgatctgcccacctcggcctcccaaagtgctgggattacaggcgtgagctaccctacctggacttaggaatattaattttttacatataattttatgttttaattaacaaataataattgtatatatgtatggggtacatagagatgtttcaatacatgcaatatgtagtaatcaaatcagggtagttagcgtgtctatcatctcaaacatttgtcatttctttgtgttgtactggtacatgcaatattttccttccagctatttgagactatatattattgttccctgtagtcatcttccagtgctatagaacactagaacttattcttcccatctgttaggttggtggcaaagtaattgccattgaaagtaatggcaaaaccgcagttacttttgcagcaacctaatagttgtaatttcaaaggaaggatttttaaaagcacattcaggccaggtgcagaggctcacgcctataatcccagcgttttgggaggctgaggtgggacgatcgcttgaggccaggagttccaggccagcctggacaacatagtgagaccccatatttacaaaacaactaaaaattagctgggcatagtggtgcacacctgtactcccagttacttggaagctgaggcaagaggatcactggagcccaggaggtcgaggctgcagtgagccatgattacaccacagcactccagccaggatgacaagagtaaaaccctgtctctaaataaataaataagtaaataaaataaaaggcacattcaacgcaccaaaaagtctactgttaagccttcagcctgcttcatccctcccttgtcttgacatacagttttgagcctgaagttatttggcaatttatttttttatatacaatgaaaattaaattcagctaaaatgaggaaaacacttggtatgtatctatacaatctaggtgatttctgatttctggagaaaaccttgtcacaggtccagaataattaggagatagttctgctggaacagctgcctggcagtcagcactcaccctgggtccgcctttgaccccttgagtttgaatttttttggccagccttggcacactaagaaaattaaacctgcctgtgtctatagacgccactgggccctgagccaatgcgttggttaatcttcgagccgtgtccctttaatgcagcatgaatttgcatcttctgattacctgtttattacctgtcaggtaaaagagtgatctagaacactgcacacttgcccagagttgggaaggaactgggaggtgtttgcatgcaggatgaagaaggaagctcctctctcaaatgataagcctaattgttttaagcaggaggatttcaagttccccacgcctcagatcagcatgcagctcacaggctttgttaagcttgtgtgacagaataatctcctttgttcaatgcccgaggaggatattttctgcattattagacaagtcaatgaagataaaacaaaatattaagtattttaagctgcgccagtccacccygaagaaattaagccccctcattctaattgtgcctagtttccttgccgtaatgagatggaggctgagctgctggaatgaggggcttcctgcaggcctgcatgccccccagtcattggagtgaacctctcctttcctctgcttagtttctttccctgggggaatttktagagccagagacctggtctccaggcgaggcaagaaataaacgcaacctccaccgtaagcgtgtgacattgatcagcatatttttaaaaaggtttccatgtctgttgcaattacgtgaaaccagctaatcctggatctaagctttggcagcttggaaatattagagcaatttggcatccagattccatcatgcaaagatttgtggtcttgtgtttgtatctgtgacactgtataatttccaattggcttttaagagacagaaacctggatgccrttggctaarcagtgagagcatttgcctgcctttctgcctccttggaagctagagcagtcattaaaaactagagaagtgagcacacgcagcaccccccggcccatgggtggttagcagactctcggggtgttactggagctgctatcattgtgggtgtaggagatgattgcaggtcctcgccggcaccagctctgaggaacccaggtgctccaagtccccagccttcatgcccgggctgtgggggccaaagggaccctggagggcgttttactatctccctgcttcacttccctccagaaaactgtgttccttccccagtgacagacttcacacccaggagctccctggttgtggggccgctggttttgcagtttgcttagagtcttttgccaggttctggagcttcagaagttcccaggaaggtaccctggacacgttcttgtgcgtgcgctygtgtgcatgtgtctgtgtgtgtatgcgtgtgcatgcccgttcccgtgtgtctgcgtacatacagcctctcacctgctttctcttccagccactccaccataaaaacagtttccgacttaaaaattgtttgccttacgatggttcgacttaacgattttcccactttgcaagggtgtgaaagcaatacacattcagtagaatccgtacttcgagtacccatccaaccatttctgtttttcgctttcaatacagtattcaataaattacatgagatatgcaacactttattataaaatagtctgtgttagatgattttccccgacagccggctaatgtaagtgttctgagcacatgtaatatagcctaggctaagctgtgatattctggagattaagtacaggaagtgcattttccacttaggtgttccaagtccccacccttcagcttaggatgggtgtatggggatgtaaccccaagcataagtggaggagtgtctgtatactcaagctaacccctatctctgttaatacttgtgctcagccccattctgggtatttataatttgctatctcatttaatcctcacaagtatgttgaccaagtgggtataattatctctgttgtgtagctagggaaacacttggctttcctgagccttaaacttgcccgtagtcacatagctcataagtttgtcacaggagctaggattcaaactagagcctgtatcttttttgggatgctcccaaagagcctgaggctaggatctgggcatgcaattcctttgggagctgatcccagaaagcactgtcaggggaagggaggcaggacatgggaacagagagatggaggcttaattgggtcactgctatgggcagctggggttcaacctgccggagatccccagagaaacgggatgcagcatccttcaacactgccccaagagagaagaggacactgggggtcttttgtttttcttaattagctttattgagatataatgtacatgacatgcaattctccatttaaagtgtacaatttttttttttctttagacaggttctctgtctctcattcaacctggagtacagtggtgcaatcatagctcactgcagccttgaactcctgggctcaagcaatcctcctgccttggtmtcccgagtagctggggctacaggtgtgcaccactgcgcctggctaatgttttttaatattttgtagagatggggccttgctctattgcccaggctggtctcaaactcctggcctcaagtgatcctcccactttggcctcccaaagtgttgggattacaggcatgagccactgcacstggcccctgaaatgtaaaatgtaatggcttttagaatattcacagaattgtgtgtccatcaacacaatccattttagaccattttcattacctcagaaagagaccccatacttcttagctatcatctctcagcccctccatccctcccagccctagacaatcactaatgtactgcctgtctgtagatttgctgaggtttttgtccacccaaattttgtcctccatcagttgggtcatgcctgggtgctaatttcctgccacttccaacttgcctcagagtgcagactcataggccaaggtcataatcgctgggagaacacrgaatccacccagatcaaaaggccctggaagccaagggcttcagcaggtgtagggagacctcagggatgcaggccaggtcctgacagtgtctccttaccaggcttcctctccattcttctcattcaggggtctcttttgcatccttctctttaaattgtgccttttattcttaagctccagggaggctgttatgaaaagcctgtcctcatgatgttcattctattgattgcatcctcttcccaggtaggaagggaatgttggtttggagaagaaggtcagggtatgcctgtctgaactgagacctgcaagatgaggttggaccagccgaggctggatgcagtgcctcacacctgtaatcctagtactttgggaggccgaggcagaaggatcccttgaagccaggagttccagaccagcctgggcaacatagtaagaccccatcttcacaaataataataataatgatagaattagccaggcatggtggtgcacacctgtagtcccagctactcaggaggctgaggcaggaggatcacttgatcccgggaggtcaaggctgccgtgagccatgatcatgcaccatactccagcctgggtgacagaggaagaccctgtctctaaaaaagagagagagatggacccagcttagcaggacagggccgagcatctcaagcagtgggttcgaatgcacagacaaggaagtgggaatgggcttggatttggcaaggatcagataggaaaccagggtgcctggagtgtgggtaataggggttgaggggcagaatgaggttaggggagagcgtgagagcagcagatcctgcaagcaaccctcgtggccctaggcarttttattgcaacagcaatgggaagccttttgaagactttcacgcagtggcacagcctgatctgatttcctgttgagacctagttcatttgcctaggacttcatccctttagcaatggattcctgcaaggcttytccagccccatgtggcccttgtccagccattaaactccagtcctaggacatgggccctgtcactagcacccctgctagcctaagtatcactttatgcaaattaggcaaaagtaccctttttgaagaccctttcctgccatctactggaaaaccatcatcattaataaataagtctaccatagtgccccctatagttgggcagtgcacaacctccacaaccttaggtggcagtcctgcatatcacccacaacagacatctctgatgctgttgcttggattgcccaggggccccttctcttgtcatatttcccagagttgtgcttctgctagacatttctggtagtcactgccatgtaccacagtactcttaggacacatgtcccatctgccaggatcaaaaggaatttttccttctatctgcagttaagtctcaacactaaccctatgtcaatgtactaatttgggttccagcctttttttttttttttttgagacagagtttcactcttgttaacccaggctgatgtactgactcactgcaacatcctcctcccaggtgtaagcgattctcccgcctcagcctcccaagtagcagggactacaggtgtgtgccaccatgcctcctagctaattttgtatttttagtagagacagggtttcaccttgttacgcaggctggtctcaaactcctgacctcaagtgatccgcccgcctcactcctcccaaagtgctgggattataagtrtgagccactgtgcccggccctgggttgcagccttctgacatcatggaagttccccttctttgctctctgtgtcgtgacacgtgacagtgagaggtagcccagggtagctgttcttctgtctgggtggacatgccctgacttccagctccttaggaaagcctagctgtctctgactcataaaagacctccaagttgtccaccagccttctgggaagatgttctttgaaaaaccgcttcagtcagcttcggccatgagcagaaatgttcaagasggcaacgttgcttctcagctctttctgtttctctgctctgaggccccttcagagatgaacgtgagagaccattgaggctggagctatttttcagggctctctggtccaccccctgggaagtggcccactttggctgtgccccagttattctggtaatgaactrtgcccaggtactgccctaggcattgttccctctctctgttctgacaaccaggcacaaacttgtctccttgtatgcaaggggaaggcagtggtggagtggggagaatgaggagaatcaggcctgaggcccaggtcggctgtcaagggaaacatttcatgattgtcaaatgggccaagattcctttagctccaacctggcctcctcttttttgagcactgaaatttctcaaaatggcaaatggaaactgaaacactacattaaatagcatttctgtgcaattaaaacacattaaaatggcaattaagtttcacaaacagccttttctgtgttctcgggttgattaagctgtttgtgttgtttttcagggatggttgttgtaactaaaggctgagctgtcttttatggattgggccgttccctaggagtcaaggaaccctgaattccaacttttattcctctcttggcaatttcactttattttcatttgcagctctttattagtctgtgagaacagactaatacaccactccacgattggaaaatttacacatatacaaaagtagagagaaaaatataacaaacttccctgcacccatcacccagcttgaacgattatcaactcatggccaatcttcccttggtgtttttttttgtttttttgtttttttgttttttggtttttgagactgagtcctgctgtgtcgcccaggctggagtgcagtggcaccatcttggctcactgcaacctccgcctccccagttcaagcgattctcctgcctcagcctcccgagtagctgtgactacaggcatgctccaccatgcctggctaagttttgtattttgagtagagacagagtttcaccatgttggccaggctcgtctctaactcctggcctcaagtgattcgcccacttcggcctcccaaagtgctgagtctacaggtgtgagccactgctcccggccccttggctatttttttttttaatcctttaaggtactagttaacttttcctaggagaaaaagtatgtaggaaaatttagtaagagaaattgacatggaagaaaggctttctgtatcctgggactgtgggttcaatgataattgagacaaatggcactgctgctctgtagagtgtaaggtctggttgggaaaacagatgagtcaattacaggaattcacagtggagagctgggcatggtggcttatgccggtcatcccagcactttgcagggccgaggcaggaggatcatttgagaccaggagtttgagaccagcctgggcaatacagcaagactgtctctacaaaagcaaaatttaaaaatttagccgggcatggtggcatgtatctgtagtcctagcaattcaggaggctgaagcaggaggattgcttgagcccaggaggtcaaggatgcagtgagctatgatcatgctaccacactccagcctaggtgatagagcaagaccctatctcaaaaagcaacaccaccaacaaaaaactgcatgatggggtaggtgatatgactctaagaggcattatgggagcacactggcgcagctgggaacgatcaaggatggcactgtggtctaacctgacccaaagaggtagacgctagccaggtgaaaggtaaggtacccttaccaggtgaaaggtaaatgaaccctattgagctcataaacagtggggggtggagggccctttttgggacctggggtactgctgtccccagtgccttccttgagatgtaggcactgagkcctgatggatctactattgtaaatctctaccatctgtctttcttttctccagcccatcctcatccaatacccatctcatcatccatctcttttggtaaaaatctcctaacgggccccaggacctccatgcctgtctagcctgtcactggaaatctagtttrtctttctgaaatgtgttctaatcttaattccttgctcagcctgactctgtctctaatggcttcatttctctaaggtatacattcaaacttcttggtttgcagttgccaaaattactgtcttgctttgatcagtttcagttgggcagtgaatcatccctcaccagagcctgaccacctgatatggtttggctgtgtccccacccaaatctcatcttgaattgtagctcccgtaattcccacgtgttgtgggagggacctggtgggagataattcaatcatggaggcagtttctcccatactgttcttgtgatagtgcataaatctcacgagatctgatggttttataaggggtttcccttttcgcttggctttcattctctcttgcctcctgccatgtaagatgtgcctttgctcctccttcaccttttgctgtgattgtgaggctaccccagccatgtggaactgtgagtccgttaaacctctttttctttataaattacccagttttaggtatgtccttatagcagtgttagaacagactaatacaccactccatgattggttcacaaaggatacaaagagagagaaatgccttaggagctggggagaggctcgggttggcattgcatttctgggactacacatctccctcaaccctgagtccactggactgtgcgtctgccaggagattcctgctagtggaatgcagctggaaggggatggaggggacagtcctgtgtctacattactagtcttgtactgaagcttcttaattatgtaacaagctacatcacctaagtttctctctgtcttttactttctcctgagtgggctttgtggtcaagaaaggacttcatcagacgcagtgatagtgtctttcgaggttgggcttctaaggagcactccctgaggttctgattagaccctggatagcacccgcactccctactcatggatacaggccctctttaaattggctcatctttctttaaatctctgttcctttccccatggggagaggagaattatcaccttcctcattcagataattgaggaatttagtacttgcttatgtaaaccaaaaagtatctgagacaggtctcaatcaatttagaggtttattttgccaagggtgaggatgcgcccagataaaaagagacaaaaattacagtaggatctgggacctgtgttttttccaaagagggttttgaggacttcaatatttgaaggggaaagagcggcagggtgggaaggaggaaagagaaagaaagggaaggtaggtagtgagataagtagtcactttctcgtgaggctttcattagcactcactggatccacgtgttgcatatcaaaggagggaggggatagaggagcagccgattatgcatttatcttgcaatcggtcaactgcattttgcataagatgaacatatggtagaggaagaagtgagataygcattggactcttggtggacagagggatgatttctagttttgtctttctccagaatctgtaaaggtaggattttaatttatgttgtcagggtgaaggaggccatttggggagataagtaacctatcttgcagctttccatttaggaaaaaaaaagggaggcagtttttgcatgattcacttyccaagcttaactttcccctttggcatagtgagaatgtattttcctttcccgctcagaatctaccatgattagtagcagacaaagattaggacttgagtcacactttttcggaggagtgatggagcagcccttggtacgtgatgatgggatcagcagtagaaccccttaattccagaactggagtggaggagttgattgcggtacacctggacatctaagggatagagaaatagcccttcttctatgctttctctcctgtctcctgggtagcttgctgtagatcttagggtctacttcagaatgcaggaggggtgcaggtatacatcttgtgctctgcaggtgtatagggttccttgaagaaaataggaacttgcaggggtgatttgagtgacttgagatcagcccaagggctgggcaggtgcttttcttccagagcagctctgcctaccaascctgtgccatggatgctctccatttctccccattctgcccatgctccctgtcacctggagcagcatctctgctctaactcaagatttctacctccaagataactacttttatccttcgtggctaaacttcctatrtttgacctaccaagaaaacaattacagcctcccagggtcatgcttggtttctctgcactcagagcacacaacaccctcagtggaatctcctgagccacctgggataaatgtcttcctggccaacatttatattctatttcttgtcgccattgctcagagcttgaagtcaccccaggggctcctttacagtaatgtggggatgtcaaagttctcatgtcttagcttaggcgaccgtaacaaaaataccatggactaggcagcttaaacaacagacatttatttctcacagttctgaggctgggacattcaaggtcagggcaccagcatggtcattttctgatggcgctctcttcttggtttgcagcagcataccttctggctgtgtcctcacatggtgggaagagggagggctccagtcctttcttcttcttacaggatactaatttcatcattggggccccactcacatcaccactttgaaacctaatcacctcccaaagtcctgacctgccactaccattatactgggtgttagcacttcaatataggaattttggagcacacaaacactcactccataacatctttgggagagggccagtgtttcccctgctgttttagcccaccttaccttgattttactgtgtagctttttaaaatataggaatgacagaactttggagtgtccttctagccagcattttttaaatttaatttgcaatcatatggtggttgcttttcctattagattagacatcactactatataagactccaagaaggatataggataatggagttcaagcatttaataaaaaatattcactgactgtcagctctttgccaggggctgttctaggtttagagaaattggtggtgatcaatacagggaataaccttttttccatggcacttacacactacggtagggagatagacatggaagcatctaactcccaagtaaacaaaaacagaaaacctgagcctgtgatgaaagttatgcagaaagttggatatggtgtcataagtgtgacacatggggaccactgcaggtgcaaatgacaggaacaatgagctgtggggaacaggtttgggtgacgaattcttatctcagagggagcagctcatgaaaggcccctgggggagacagcatatgtccctggtctgggaactagatgccatccagggtggctggagcaagtgagaggagaagaaaaagaggacagggccaggtcatgcattccttccttgccaggacatggaagcagcattttattcttagctcaagggagacatcttcagagggttttaagcaggagcatggcatgatctgatctaatttataaaaatagaaataccgtgtgagaatgctcatcagtaatttctacctcaggcatcttctttcttattttctactgagtctgtacatttcctgtttcccttggtttctaaagaaaacaattatcttcatatcatcatttctacttgttctttcctttgggatccaggatctaatctgaaaattgctttccccaaggaactctggatggctgatgtaccatcacttcaagccatcagtatgtgctatgctttgactgtggtgtttcttagagtcctggataaactgtgcgatttaagcaggatgccattaatcacgcaagagacacgagtccagcagcagttactaaaatcaatatggcttgagattgtgatttccagaatatctcctcacttagtgagtcactaggaaacttcagaatagccgtatagattttaaagcagctttctctaaacaggatttggatatactcccacatttctccttgggcggagggagaaaggatggatgttctgaacaacacatrttttaaaaaacccactgccaggcaagattaaaacctttgcctggaagggagtcggaagattctctgggttccagtaaatggtctcatgcctatttttcccagtctcttgcttggattaggtaaagggtttaatcagtaagaattggccaattaatttctcccttctcacattcattcattttgtaaccagacattctgccagctgtcctggaaggtagtgagaggagaaagacgtcatttcttccttccagaaagccacaggatacatcagtgtcatggttgaggattatttaggcatatttccattttccaagttaatgtgttaccctcaggcttgggtggcttcagagcagaaaagaacaggtgagaccaggtacaagtccagctggttcagggactgtgacaaggagagaagtgtgatctggaactgggctcagcagtgttccaagtaggcatgtgtaactaccagataaacacagggatgcaggattcgagaggggtagggaggagagagagcagaaaggaacagggtccattatcttatagaagtcagcagcagtattcattaattcatccaatcattcatttattgaacacttatttctatctaactgtaatctctcttcagtcctttcacctacaccacaagtatcatttcctttgccttactagttactaaattctgtacgtctgtcccttcctccaatctctgagctctactgcatttttcctttagaatttttttggttttttgagatggagtctcattctgtcacccaggctggagtgcagtggcatgatctcagctcactgcaacctccacctcccaggttcaagtgattcttgtgcctcaccctcccgagtagctgagactacaggtgtgcaccaccacgcccaggtaatttttgcatttttagtagagatgagattttaccgtattggccaggctggtctcaaactcctgacctcagatgacgcacctgcctcggcctcccaaagtgctgggattacaggtgtgagccaccgtgcccagcctagtattttaagttagacttttgtcctccctttttgtgtccagtcagtattgcacctagaaggcattcagtccattgttgttttaataattacgatcgttaatgtagctattcaataaaatgaatgaatgaagttaattcaggatatatgaaaacgtctccaataaaataataagagagaaagaaggtctaaagaaatcagcatgatatataaaaatcatgcagaaaaaccattatactgattacttactatgtgctgagcttcacagaggctctgagaaaccagcaagaggcagtcccagccctcaaagagctcacagtctatgaaggagacctccatacagatatgtaattgtaacacagtgggttagaatagcccattgtatgtatggggtctcatgggggcctagagttggagacttctgatctttcgtgggctctccaaggatgcttcctaaataaaatgtgctagaattctatgttaaaaaggtgggctcatgcctgtaattccagcactttgggaggccgaggtgagcggatcacctgaggtcaggagtttgagactagcctggccaagatagtgaaaccttgtctctactaaaaacacaaaattagctgggtgtggtggtgcagacctgtaatcccagctactcaggaggcagaggcaggagaattgcttgaacccaggaggcggaggttgtagtgagctgagatcgcgccactgcactccagcctgggcaacagagtgagactccgtctcaaaaaaaaaagaaaaaacagaaggtggaatgagacctctgggcagagagaccagcatgggcaggcaaaggaggtaggaagctgcatggtgtgtgtggaggttggaaaacatacttccatggatgatggcaaaggcagtagatggaggggccatcctgcctggccctggaatcccggcaaactctttattctccatcagtgtggtcgttggaaagattactaggcttgaggtgggagggcagatgggtttaggaggcgggagcaagcatatggcaggaggggatggggccacgagatgcatagacccagcaaaagcactatcaggaggagagactaggagaggagggacaggagtaaccaggggctaaacttggcttgagttttattgagtggcaaatgatgtcactcccttctgattcacctgtagtagaatttgataagggatcagttcagtcttcagacactgtcagaagtgcaaagctgatctccaggtaggcgagggaggagaatgaaagctgcccatggaagatgccatgtgggtcctgggagccacagaaaattctggatgtgtgtgccatgtattttcattgaacacgtgtgtgcacatgcacatatgtttggtattggatgctgcaattccagcttggcatgtacacttctttgtagctcagaagggctaaggcatggatgctcagatagatcccaaatctttttttttttttccccaaatcaggttctagggctgtgtgctggtgagttaggccaagaccaggcttagcacatctgtccccaggtggacacagcagccaggtctgcccaatctaaaggccaccttacctttgaccacctcctttcccagcaggaagacgccctttccttcatctaccattcgtgtccatctgtcctggactacaaaagatttgcagaacctgcctggagacacgtctttgtattaactattgcaattcacaccttctctgttgaagggcttggagccyccttgtgctaatgtggcagcctttctgcctcctgtgggtaaggactgcagtgaaatcagatcaccgtgactgaacgcagttctgagccagctgtcgacttacactgctcagttctgttttttcttcctggccttctcacgcccaggccctgagcccagtggatttcaccatgctgggttgctcataaaaaatggtttcttcctgatgcttttggtggcagactgaatatcatcaatcatgctgcaagaaggaaacacagattcccagctgatggcattgtcatgtttatgacacatccgaaacagtaacagatggtctgtattaaaagtgtaactggtgagtgagtgctttcataatcatagagatattttttattcccctaaagttttggttctagaaggagtcacagaacgttagatcataagggcccctggaaagcttcttgtccacatgtctcatttttacaaacaaaaatatcaaagtacagtgagattaagggatttgccaaggtcattgagctaattagcgatgagaccgagaacaaaacccaggcccctaatgttccatctaatgctctttgtgcaatactgtggagcctgcggatccacactttgtcttctcttggagaagaaaacagaccgtgctggaaacgcacagggcttctgtgagttccttggcatggtgtcaatgttggatgcagagagtcctcaaaccctcttgagcatggttggcccttcctgagaaggtgcagaaaatgcaggtttttattctcagggcttctgttggtgtggacagactgtattagttcattttaatgctactgataaagacataccgaagactggacaatttacaaaagaaataggtttaattggacttaaagttccatgtggctggggaagcctcacaatcatggtggaagtcaaggaggagcaagtcacgttttacatggatggcagcaggcaaagagagaatgaatgccawgcaaaacaggtttccccttatcaaaccatcagatcttgtgagacttattcactaccatgagaacagtatgggaaagaccctcccccataattcagtcatctcccactgggtccctcccataacatgtgggaattatgggagctacaagatgagatttgggtggggacatagagccaaaccgcatcacagaccacatccaccagcgctgcaatgcaaggcttggttttcaagccagtgaggtggcaacagaaactggatctcttatctgatggaatccagtttcacctgggttcatttcttgattgatctgaggatgttcggatcagtaggaataaaccaactagccaatggttctcaaaatatgcttcctgaaccacagcagaagcatcccctgggaacttcttagaaatgcagattcttagttgggtgcaggagctcatggctgccatcccaggatgtcgggaggtggagacaggaggatcactagagcccaggagttcaagaccatcctgggcaatgtagcgagacctcgtctctatggtacataaaaagctaaaacttagccaaactggtggcacacacctgtagtcccacacaattctgtgaacattctaaaagccattaaattttacattttaggagccaggtgcagtggctcatgcgtgtaatcccaacactttgggaggccaaggtgggagaatagttgaggccaagaatttgagaccagcctgggcaacatagcaagaccccatctctacaaaataatttttaaaaatttagtcaggcgtggtggcgcacgcctgtggccccagctactcaggaagctgaggtgggagaattgcttgagcccaggaggcagaggctgtggtgagctgagactgtgccactgcactccagcatgggtgacagagcgagaccctgtctcaaaaaagagaaaagaacagagaaagaaatgcagattcttggccaggcacagtgagtgggctcatgcctgaaatcccagctgtttgggaggctgaggcaggcagataacttgaggccaggagtttgagatcagcctggacatgataacaagatcacgtctccacaaaaactttaaaaattagtggggtgcggtggcccccactatttgagaagctgaaggaggaggatctcttgaactcaggagttcaagcctgcagagagctatgattgtgccactgcaatccagccttggcaacagagcaagaccctgtctcaaaaaataaataaataaataaataaataaataaataaataaataaataataaagaaaagaaagaaatacacatcctcagcccccagattaagaaactctgggctgggtgctgtggctcatgcctgtaatcccagcactttggaaggccgaggtgggcagatcacgaggtcaggagatcgagaccatcctggccaacatggtgaaaccccatctctactaaaaattcaaaaactagccagatgtggtggcacaggcctgtaatcccagctactcgggaggctgaggcaggagaatcgcttgaacccaggagtcagaggttgcagtgagctgagatcacaccattgcgcttcagcctggtgacagagcgagaatgtgtctcaaagaaaaagaaaaagaaagaaactctgggcataaggccaagttgtttaatagttttagttctattactattaactagtaatagtaactagttattaactattattatattatattatatatataataataatatatattatattatatataattatatattatcatattagtatattgatattaactattactataactagtactattaactagtaatattattattaaatagtaatatactattactattaaatagttttacttctattttttgtgtgtgtctgttttcccgcgttccccagttggttctgatgctactcaagtttgaaaaccactgatctaaactgtccccagtacatcaaactctgacaaaactctacccaaagcctacacatggcttcagtcttgaactggttgaatcgatggccacggtatgccagaagcattccctaaaacatttggaaattgtctttgaaggaggatgttcaagaaagtgaagtcactgttcttgagagtataacttttctgtgttagttttataaaaagtggtgagaatgacttactgtaggtctctgatttttataggtgtagcaagtgctgaatttcatcttcctgaaattaacatggccttattttcttagtgtttgcttttgcccatctttttaacctttctgtgtcattttgatttgagtgtgttgcttgtgagaagtatgtggatggattctgtttttaaactcagttttggagtcttcacattgtagcatagaagcctgaactgtgttaactgtgttcattgtcagagctaataaccactgtcctcactccagtcctagtttacatctcctatttgcatccttccttgccccttgttttgtttttctccgatacttcttttattggtttttatcttctctggtgatttggaaaagatacattttattaagttggtgcaaaagtgactgtggcttttaccattaaaagtcatggcaaaaactgcaattacttttgcaccaactcaatagttttagttctattacttttgtgtgtgtgtgttttgtttgtttgtttgtttcgagatggagtctcgttttgtctcccaagctggagagcgcactggtgtgatcgctgctcactgcaacctccgcctcccgggttcaagtgattctcctgcctcagcctcccgaatagctgggactacaggctgtacaggcccgccaccatgcccggctaatttttttgtttgtttttgtttttgttttttgtatttttagtagagacggggtttcactgtgttagccaggatggtctccatctcccaacctcatgatctgccctcctcggcctcccaaagtgctgggattacaagcgtgagccaccgcacccggccaactgttcttgtggtaatgagtaagtctcatgagatctgatggttttatgaggggcttctcctttcgtttagttctcattctctctcttgtctgccaccatgtaagatgtgccttttgccttctgtcataatcatgaggtctccccagtcatgtggaactgtgagtccattaaatgccttttttttttttaataaattactgaaattactcagtcttgggtatgtcttttctttttttttttttttttttttgagatggtgtcttgctctatcgcccaggctggagtgcagtggcatgatcttggctcactgcagcctccaccttccaggttcaagtgattctcctgcctcatcttcctgactgcttgggactacaggtgtgcaccaccacacccacttaatttttgtatttttagtagaaacaggattttgccatgttggccaggctcatcttgaactcctgacctcaagtgatccacctgcctcggcctcccaaagtgctgggattacaggtgccagccaccacgcccggcctcgagtatgtcgttatcagcagcatgaaaacagactaatgcacacacctataatgattattagacttaactgttagagatttttagtgccagccacaagttctttttagtcaaaaatgttctcacttatctttcttcattttcattcttggtaggatgttagacttttttcctggaagagagttgatgtgactgccgcttacgcacaggaccaggaatagaaacagtacctaggctatttccatttccttttctctgtcaaaaaccaatttcttttccagaatccacagccaattcctcacaaagtggttgagcctagtcgcaaaatcagacaagacttctcacactgaaatgcgaaatatattcttttgcaaaacggcaccgtcccatgctctctgcatttccagacgccagtctacttctgtggctttactgacatggttacatggaatttttattttttattttttattttttatttattgatttatttattttggagacagagtctctctctgtcgcccaggctggagtgcagtggcacgatcttggcacactgcaacctttgcctcctgggttcaagcaattctcctgtcttagcctcccaagtagctgggattacaggcatgtgcccccacgcctgactgattgttgtatttttagtagagacagggtttcaccatgttggccagtctagtcttgaacgcctgtgtgatccacctgccttggcctcctgaagtgttgtgattacagacatgacccactgcacctggccaattacgtgtgatttaaatcccctccctgactgccagtgtccagatacagcctcagcccctctcagtgccaactcctccaggaagtccaccttcatttctatggagctgtaatctctccacagtccattcgtctgcatcacaactatcatttcctttgccttactagttactaaattctatatctctatcactttcaccagtctctgagctctcttgaattcttctttagaattttaagttagaatcttgtcctctctttttgtgtctggtctgtattgcatctagaaggcattcagkctgtttttgttttcataattgtgattgttgatgtagctattcaataaaatgaatgaatgaagttaattcaggatatatgaaaacatcacccataaaataataaaagagaaaggtctacagatagttcagcatgatatataaaaatcttgtagaaaaaccattatatactggccattaggcaatacaaattcagagaagagaaaaattaggacaaagtcattgcataacaccgctgtttaaatgtgaagaactgcaattttcccccgattatgtgagatcagtcctctgaggatgtcattaaggtttctggtatgtaattgaaaggagccctgagcctagagattccaagtcttcaactgcatgaagacctatttctcctcatttctggcctgattatcatcctatcctctgcaggctggcacggaaggctcacttcactctcgacttcaagacttgtgtaaacttttaactgtcttttctcactgtgctcatttcagagttggtttgttaataaatatttgccatctgtagcaaatcttaaaatgtaccaaaatcttaaaatgtctgcaataaaaagcaagacaagaaacttggcagtttctaagaagagacctttattttatacttaaacactggcacgtgtgtgtatgcgcacgcgtgcatgcatgtacacacccacacagcacacacgcatatacacaccatacacacacagtacacacacactgcgctctgtcatagagacacaccctgcacatttgcactcgcttcactacaatccttctgtatttatctatcttttctctactttggaaatacaactattgcaccaaggttttttttaaccaaaattccctccagttttgtccaagttatcaaggctgtcgtgtcaacccaaagggtcttggcaagcaagctacaaaatagagagcttgaaacttagccattccaggacagggagcttgtactttgcaatctatggtacagaattatcgaatgcctttggttttgttgttgctgtttttgatatcatcttgttttgttactatctaaaaagcagayaaaatgggctgggaattccctagttttcacaactgttttcttagctagaaggcttttagaccaacatagcacacctgcatctctgactttatcttccactgtgatgtcctgtgggctgctcccatctgggagtctgccattagatatggccagggctccaattttgtcataattacatcagcaacagcaaaattgagaagactgcatttgctccactgtgtggcataaccagtgaccccaaatcatggtggcctccccagcgtaaggtcatggttgcccatgttccatgtcatctacaggctacagacaacatcttgaggcagtaggctgtctgctccatgtgtcttctcatcctgggacccaggccaaagagtagtacctatggggtccatgctgttcttagggaaggggcaggagtaatcagagccaagccacaaaagtgtgcytgaagatcttgtttgaatgtggtctacatcacattcatcatatccagttggcccatgaaagttacatgaccaaaacgggtgcaccaaagtctcagaaatcaccactaaagaacttatctatataaccaaaaaccacctgtttctcaaaaatgattgaaataaagtaaaaacagagaaagcttagggagaagatgaataaaacatttttacagtggttaaaaaaaacaaaagttgaccgggtgtagtggctcatacctgtaatcccagcacttcgggaggccgaggagggaagatcacctgaggtcaggagttggagaccaacctggccaacatggtgaaagcccgtctctactaaaaatacaaaaattagccaggcagggtggcgagtgcctgtagacccagctactaaggaggctgaattgggagaatcacttgaacccgggaggcagaggttgcagtgagctgagatcacaccactgcactccagcctgggtgacagaccaagactctgtctcaattaaaaataaataaataaataaataatgaaaaaattacattaccaagctgaaggtcagtaggataggaaataacccaggaaagcaaggttgcaacaggaaggggatgaataattgtgttgaattaataccatctctctatgtttacaactccaatatcttcaagggatgggggggcaattagaaattctagtgaaattaggtaccaaatggtagcttccacacatagtaaggaagaaaatttggcccgatgggcgtatggataaattcatattcacctatttgtaaaaaaaaatcgaagagacttacagtcaaatcacagatgtataagatttaaaccatgtgacataattaaatgtacaataaaatgcagagttatttataaagtagatatataaagcttcagccatggaaacgacccacgtagccgtccaggtaaagggaaatgggataccaagcttccatttggtggcagtgaaatgtgtacagacatattaagagagacggcttttcccagctctgagcttcaagtagcattctttattttttctttgcataaagggattgatactttcagtagcagatgaggcatgcatgccgcatgccacatgtaactactctgtaagagaaggttgagtatgtactgttactgcacaactaggtaattaataacctgtgaattttagttatgtttacttcagcatttgctaagctaattgttcaatcaagaattcattgttacaaaagagttgtttaagtttgactcctgggcttttctagggaaagcttttaaagtctaaatacctagaaaatgtaaacatacttttgtttaaaaatagagattaattatgataatcaaagtggaagcatttaatgaaacaatgggctttatgattagaaaggtaaacaagaacacataattagttagttgattacttttccattttaaccaaggcagtgtctggctactcatccttttttccacttacctggtcaactgttgcctagtggacaaagttctggacccagggggcaagtcctgggtccctgctgtccctctagcacagttcatatgctcctaagtatctggattgactgaggttttgttttgagttgggtttatgtctaacctttttgatgtctattttgctggttaattgtgaattcatagtattcgtgtatgtctgtgcaacgcaacaacacacacacacacgcacacacacacatttacttctcctaaagacttttaaaggacgaatgttaggagataagtactcattttctatctcagttattcttaacgtgtagtctaggaacacctacatcagcagcctgggagggactggttgtcaacaccgattgcacaaaccttctaaatcagtgtcttttggagaggtacaagaatttatttatttatttwtttatttatttatttatttatttatttatttatttttgagacagagtctcgctctgtcgcccaggctggagtgcagtggcgccatcttggctgcctcctgcctcctgggttcacaccattctcctgcctcagcctcccaaatagctgggactacaggcgcccgcctacaggcctggctaattttttctattttttagtagagacggggtttcactgtgttagccaggatggtctcgatctcctgaccttgtgatccgtccgcctcggcctcccaaagcgctgggattacaggcgtgagccaccatgcccggccaagaattttatttttaacaagctctccagttaattcttaagcacacaatgatctaggtcagcattgtccaacagaactttctgtgatgatggaaacacttcatataggcattgtccaatatggtagatacatgtggctgcatgaacacttgaaatatagccagcacaactcactgaatctttattttaattactttatatcaaaatgtatttttattaaaatatttttaaaccattttattgtgrtataattgacatataaaaagtagtacacgtatgcaaattaatgggtttgaagataagtatatactcacaaaactaacaccacaatcaatgctataaacctatcacctccattatgcatcaattaaaaataatagtaaaagcraaaaaaaagtatttacctgctccaaaagttttctccaccctcttttattattattaktttgtgatgagaacacttaacataagatctacccccttagcaaatattcaattatacatacaatattattaactataggcgctatgttgtagctacatgtggctagtggctaccatattggatagtgcagagctagatgataattcagcagcagctgcacacatactagtagtagtaacaatagtgaaaacttgtatgtggcttgactcaggctttttaaacttactatgtgcctgacactattctaagtacttcctagatataaactcatttaaatctcacaaacttttaggatgagattatatttttgagacagggtctcactgtgttgaccattgtgttgcccagactcactgcagcctcaacctcccaggctcaagcgatcttcccacctcagcctcccaagtagctgggactacaggcatgtaccaccacttctggtttaaggcatttcttaaagatagtagatcagcggggtccggtcaggaagacagaagccaagctaggcatttcaaacagagcggaatgcatataggatattgattggttacactggcattgaaaggctgaaagagaaaaaggaatactgaggtaaccaagaacaataatgtaggaagcagcttccaatccctagggctggggagctgaggaaacagaaggaagttgaacacgggagggacctggaccaccaaggggtgttaatggcaaatgctcagtgcatggggaagccagtgtggttggtgccaggaacttcatgagttcccaagtactgggagcaccagaagctggagattagagttcttgtcttccttcacctcttgagagatgtagacttgagctgaagatgggaaacaagccctgtttccttctcctgactttgagyctcctgcttgtgcctcccattggcagaatctaattttatggcacacaacacccgcatagctcaatctaatcagaagctaatcacaaatctaatcagaatatataatcaggcacaagggtctggaaaatgtgtttggggacttcttgccccagtatcacagttcaaggtgtagaaagatgggcttggagctgaggagaagagacagatcatttgcacgaaattttttgataagcactttgtttaaagtaccatatgtctaaatgtattaatgatatcatcactttctgggctaaatagcatatgtcaggcagttcttagggagatgacacggatgtaagtgaccaaatcttgattaattgtcaattactgcagtcaccccagctaggttctatgcatagttatgcatgcatatggggacttcctccctactttgctaattggtctctttcctcatttgctatgaggcgctcccatacagttggcttgaagcattagaggctacactacgggatctgcttcttgccctttctctgagttcactcscatctgcagacctccaaatccttctactctcatgtggggaggaacaaaggaatyaaaaaagtagatgctagaggagttatctcttgctgctcctgtttacaatttctgagcttctcccagtaaaagccccattgccttcctaggrccaccatttctcctcattttggtgtggattatacaaagttcttcatttttggagatggactggggagagtgtgtgccccacctccacctacaaaccctgcatgaggtcggagagtaataaatgctcatgtttctctttgactaaacactcagacgaagaaatttagaaatatattccttgataaaactgtgaattatctaagagaattgatcttcaccacatggcttaaaagtcctcctatggaggagaagctgaggacttgaggcaggaaccaacacaagttagtaatatggtgactagcttgtgcatttgttaaactataagggaacaaaaatatgttcattttccctgccagaatccataaaacaaacatgatgtataataaattaggaaaggaatcagagaagactatgagacgatgtattcttgcgtcttgcagttgataacaaccaaaacatttcctaaatttctggtttctgtagcaaatcatttcagagctaaaatctttccttgagatttcaggaagtaattctctttcccttgctttgcggtatctttccacagactctcatcctcaggagagatgctgagcaacatagttgattatcttaggattgagttgctggtgagagcctgttttccactttaacagctggggggcagaacaatatgcacagatcacaagtatgctcctggaagcttccttcatggaataaggcggcattatctctgtaccccattcccaaaggtctctaaggtgctataggttcgctttgcatgcttgttttgggtttctttgcatgtgctgctgaatacctagaggtttggcctagatctggttgctcacggaaagccaatcactgaaacaataagtattgccagggaagacagctgtaacacaggtgatgtcagctgggagatggaaggctgctcccaaatccatctccctaaccaactaaagtcaggggtttacatagcgaagaattagagaggggtacaggaagaggagctggtcaacagtcagcaggtggtcagatgaggggtctggcgtctctttaaatcatgtgtggcaaaacaggaattcggagtaaggaattgattaacaggcagttgtccagatgcggtaatctggtaagtttcaattccctgataccgtctgggaggcctgatggttggttttctgagaaagaaactcagataaaacaaatgtaaggtgttcgtctgttctcatgctactaatraagacatactcaagactgggtaatttataaaggraagaggcttaattgaccygcagttcagcatggctggggaggcctcgggaaacttacaatcatggcagaaggagaagcaaatgtgtccttctttacatgggggtagcatggagaagtgtaaagcaaagtgagagaaaagccccttataaaaccatcagattggccgggcacagtgtgtcacacctgtaatcccagcactttgggaggccgaggcgggcagatcacgaggtcaggagatcgagaccatcctggccaacaaggtgaaaccccgtctctactaaaaatacaaaaaattagctgggcatggtggcgggcgcctgtagtcccagctactcgggaggctgaggcaggagaatggtgtgaacccaggaggcagaatttgcagtgagccaagatcrtgccactgcactccagcctgggcaacagagcgagactccatctcaaaaaaaaaaaaaaaaaaaaaatcagatctcatgagaactcattcactatcacaagarcagcatggaggtaactgctcccataatttaattacctcccactgggtccctcccacgacacgtggggatatgacaactacagttcaagatgagatttgagtggggacacagccagaccacatcaggaagtttcttaagcttcagttctatgcaaaaatcgggccaattttacatgcatcttaacgtattgactctcacaatctcaggcatgttgtaagtgctaccatctccctttcttgctcacttcggagaactacacttctgtgatacggtgtactaggttcccttctatcatattcccagctggttgtttctgggagtttcagggtcttaaattctgtacaaagagaggagaatagtacatacaaccctcgtcccccaaagtagtaggagccaacatgcctagttttgtattttcttttgtgcctgagcctttggaccaatgggaagatgtgaggaagggcccacgtggcttccttgtcatccttcaagaggacaaaaatgttgtgttttaagagggaggccacagttgtgtttttccatccattcccattgaccgtggttactattaaatagctatttttttggcagagtctagcaataggttgcctgaatccaagccttgtgatgatgagaaattttattttcttctgcattttcatccgtcttagcacctgatgagaaggtggcactggggctgctagccagctgcatctgccttctggatctggcacatgcagccctttgtttgctgtctctttgttccatgatgtgacccaggttcatgctccctgtcgatgaggacacccagattaaatatgtacagaaaaaaagagggcagtggaataaaatcgagtacatttcctataatgtctatgtattctcacctgcaaagtaaatgtacataaaattcatgtttgaggaccattaagttctgcttatcaacacaaagattgtccaagcaataagtcaactcacaatgtgatgcttccctctaacatatggcctgataatgactctactttctttgtctctggagtttgcatcaaacatctgtgttaggaagagtggctaacatgaaatccttggtcatgatttctttgtacctgtttattaagaagacagatgccatttctgggccaagtgtcaagatccaacagagtcacttggcaatttgactattggttggtaaacattaagcattactgcacctgaggctgagttccccaaggccatttaatttgtagaaataaatgcatttaatttccaacagttagaatttttgactctgtgtactgtaacactggagcggtgtctatataacaccgcagccaggccattatcagagcttgtttagtaataaaaatcaatgaattcagcctagcaactcattttatgactcaactgactatttgagtctgttttggcatttagctttcaaagattaaagaccaaatatcagtgactgttcatagcaaaaagactgtttatctacttcggtgactgctcttgtctctaagctccttttcccagagatgatttggcaggctcgcatttacccaggctctgatgatgcccctgcctttgggaggctcctagatctgggtctcaccttttctccaggcacagccaaggcagcctggctcagagacccagaccctagacacagccatggcctgggcattgttcagggctctcagaaagcagcaaggaagacaggtcttcagctttcaggagctctgtattagtccattttcatgtggctgataaagacatatccaagactgggaaggaaaagaggcttaattggacttactgttccatattggttggggaggcctcagaatcatggcgggaggtgaaaggcacttcttacatggcgatggcaagagaaaatgaggaagatgcaaaagcagaaagccctgataaaaccatcagatctcatgagacttattcactaccatgagaacagtatgggggaagctgcccccatgattccaatgatctccaactgggtccctcccacaacacgtgggaattatgggagtgcaattcaagatgagatttgagtggggacacagagctaaactatatcaagctccttgtagaatgggaacgacagcaataaagataagttccaagtggcttgatgtttcctcttaaaaggttaagtgatggcaaatgcccggcaagatctgaacttggaagatcaagattcctcacgttctgatgccacatagttaaccctatctcctggaaacccttccccagcccctgcacagggacctgtccccttgagtcactttgtatgccctgaacataccatgcgcattcaaacctccgttcctgcctctgtgaacccatcatccttctactgcctgagatgtcatgttcatcccattgcatatttgtctgcctggtgatggcctagttatccttcaaggctcatcccaagtgcctccacttcttcagctttctcctaaattgatctctcggcttcaggagcattgtttccatccatcgattttgtttcattttgcattgtatatcatagtcatttgtttatgctatagagccaaccatgaaatgtttaatgaggagaagtgtggcttaaatctctttgtgtcctccatgcctggtataatatggtagggtgaatggtggcccctgcaaggatgtgttcacatcctgattcccaagcctgtgactgtgaacttgtttggaaagaggagggcttcgcagatctgattgtttggaagtgggtggcggacggttagggggtctttgcagatctgaaggtcttgagataatgagcatctgagattgtttatgtgggccctaagtcagacggcaagtctccttataagatagaagagaggmcaggcactgtgacatgcctgtaatcccagcactttgggaggccgaggcaggcagatcacttgatgtcaggagttcaagaccagcctgaccaacatggcgaaaccctgtctgtgctaaaaatacaaaaattagccaggcgttggtggcacgtgcctgtagtcccagctgctcaggaggctgaggcaggagaatcacttgaacccaggaggcagaggctgcaatgagctgagatcaaggcactgcaatccagcctgaggaacagagtgagacactgtctcaaaaaaacgaaaacaaaaacaaaaagttgaagagaaaaagacacagagacagaggagaaggccatgagaggatggaggctgggtttgggattatgtgatcacagatcaaggaattcctgtggccaccagagactacaagagccaagagcagattattccctggagcccatggaggaaggacagcctgcctacgccttgattttggactttcagcctacagagaactctaagaggatgcatttcagatataagccatccagtttgtgctaagtggtaaaggcagcccttcggaaactaatatatataacaactggcacaaagaaagagctcagctgttaactgaacgaacattgataattttgtacttagaacacttcgagtggttaaagatatttaagatgaaagagaaaattctaaatgtgtcttctgctccaattatgtttttatgagtccacttgaaaccctggaaggcagagcttgccacggctatttcaagcacccctctcctccacgaaagaggaaataacctcttattccatcagcccataaaccagcggcacgtggacgcaacatcaccccctgcacttcttgtcttcagcaagaatgagggcayggagaactccacttcaagcttttcagtcaacccgacgggacgcgacagattacagagcaaagtgcaccaaagataccatcagttaacctaataaaattgatttaaaagcttttaaacttgagagtgagagttcagtgcctgcgaaagatctttcagtcccttgaagtgatgaaataaaatgatcaatcgcccttatcaacctccctttttttggtaatgtggtggcaggaacagcttttccactgtcaaattaaccctcttttaaaagtgggtttctgcagcttctgctccactctctctgagctcaggagctgagcccttggaactcttatgtcstctgttgctggtctcatcttctattgaagggaggaagggaaggaggaaggagggaaggacggacagttggacggagggagagagaaaggaaggagggagggatggtgggagagagggagggagggaaagagggacagagggagggagagggagactcaggatactcaatgtttttggggggtttttgtttgtttttgaggagtctcactctgtcgcccaggctggagtgcagtggcgccatttcaactcaccacaacctccacctcccaggttcaattgattctcctgcctcccgagtagctgggattccaggcgtgagccaccgtgctcaactaatttttgtattttttggcagagacaargtttcaccatgttggccaggctagtctcaaactcctgacctcaagtgatctgcacctcttggcctcccaaagtgctggcattacaggcatgagccacaccgtgcccagcctcaggatactcattggtttttgatccttcatgctctctctgggcgcttggcatggggagcttttcttggaggttgcggttattaaaatgccttttgaatgataaaaatagaaatgtgtttattgttaaaaaaataaaataaaggaacctattgagaattaattatataagctcaaaaccccttatctcactctcttcctttgaacagcttggtgtagagccttccagcccctgttgcttatgcctttacaaagatgtgtgtgcgtgcacgtgtacaggtacatgcactcatgaatatacatggtgccttcgacatcaatccaacacacatatttttccagcaaatatttttatagcacctccgatgtgtcaaactttgagtatgtcatttaaattattctgtaacttgtttttttcactaaatgcatcagagacacatatggacacatatctatttcaggagtttagtcccacctttttttttttttttttttttttttgaggcacggtctggctttgttgcctgggcgcatgatcacagctcagcagcctctaactcctgggctcaagcggtcttcctgccccagccttccaagtagctgggactacagtctggagctactatggtagcacaagtaggtactccagacttccaagtagctggaactttctgccccaaccttccaagtagctggcacttccaagtagccaccactcctggctaatttttaagtttttctttgtagagacaagatcttgctgtgttgccgaggctggtcctaaactcctgggctcaatcagtcttcctgcctcaacctcccaaagtgctgtgattacagttgtgagccactgtgcctggcctttttttttttttttttttttttttttttttttttgatggagtctctctatgtcctccaggctggagtgcagtggtgggatcttggctcactgcaacctctgcctctctgcctcctgggttcaagtgactctcccatctcagcctcctgagtagctgggattacaggtgccagccactatgcccggctaatttttgtatttttaggagagactggatttcactatgttggccaggctggtctcgaactcctgacctcaagtgatccacccaccttcgcctcccaaagtgctgggattacaggtgtgagccactgtgtcyggtccatgcctggcctttttaacagttaaatgtcatttcgttcatctagtaaacaactatgtagtaagcacctactgtgtgtccccgtggtgtgtaggtgctgggcttacagcagtgactcagcagaacaaaggcctccatctccctttgtagagtattttaatcaggacctactgatggacactagggttttgtgttgtttttttttccaacaaatgaagcaactaatagctttaaatgtatattttattacataggtatatttatgtaataaatgggccacctccctaggagtagaagtgttctatttaatcctagagcatgacagtgttatatgtatgtaattcacaagccagagcaggagattcaaactgcccctgatgacagcattcaccagtgggccattttcttagttaacacaggatcagttaactctcaacagctgctttaggtctgcttctccctgccttagattaacatctgtgcttgcctgccctggattctttaagacacatcgaagagttatgctaaagaaacgatggccagccgggcgcggtggctcatgcctggaatcccagcactttgggaggtcgaggtgggcagatcacttgaggccaggagtttgagaccagcctggccaatatggtgaaacctcgtctctactaaaaaaaaaatacaaaaattagctgggcgtggtggtgtatacctgtaatcccaactactcggtaggctaaggcaggagaatcacttgaaccctggaggcagaggttgcagtgagcagagatcgtgccactgcactccagctgggcaacaaagcgagacactgtctcaaaaaaaaaaaaaaatgctgcgtatgatgggtggcctggccttatgtgtgctgggcctggctgaactacacttcccgaagcaggtggatcacctgaggtcaggggttcaagatcagactggccaacatggtgaaatcccatctctactaaaaatacaaaaattagccagacatagcagcrggcacctgtaatcccagctattcgggtggctaaggcaggagaatcgcttgaacccaggaggcggaggttrcagtgagccgagatctcgccactgtattccggcctgggtgacacagcaagactctgtctcaaaaaaataaacaagaagagaaaaaaaagaaaaagaaacagtgatcactggttttcagtgtggagagagaattcctctgcccccggcttcacctcatttcctttcagagacccccttccacctgtgtcatgycactaagccaccctttccctgattcctaacaatgtaaggagattggaactgaggctgggatgccttgctgttaatcttccagagaacccgatgcaatcaagttgcacgtctaaaatgaaaaaggaaaggacaacctcattgtaaatattattaaatcaccattcagttacttgcacatcgtgtctttctgaattactgctgctctcctaggaatacacacacagggaggcccatttcagagacgacgtcttatttaagcagaacagttgctgaagaaagagtatgggaatcaggcccgttcattcattcatatagagcacttgctaagtgaaaaaaccttgtgttaaatgcaggcgatgatacaaaatggggaataaaacagggatacgtttttacagcaggggaaccggatcgtgcaggtgaataaccgcaatagaaagtcaaatggaataaatgcctgagatgtggggaacaggcttgcttggagttcagagaagcagctgcaaacctccttttctgatttgcaaattaaatacatgtaacactgtcatgctctataattaaacagaacacttctaggaaggtggcccataaatatacttgtgtaataaaacatacatttaaagtattaactgttgcatttattggaatttaaaaaaaaaacctagaaaatccacttgctttgctgctgatttttctgcaacyctaggagaagtcactcttcactaaaagataatgataatcgctgggcacagtaaccccagcactttgggaggccgaggcgggcagatcacgaggtcaggagatcaagaccttcctggctaacatggtgaaaccctgtctctactaaaaatacaaaaaattagccaggtgtggtggcacgtgcctgtagtcccagctactctggaggctgagacaggagaatcgcttgaaccggggaggtggrggttgcagtgagccgagatggcatcactgtactccagcctgagcgacagagtgagactccctgtcaaaaaaaaaaaaaaaaaagataacgataatctggaagcagtgatggaaattgtcagatgtggttggagtgggatacagggatttgcattctactttccttgtccctttgagaattaaaatatacagcagatattttgcaagcagatttaccccgactccttcagccgaggttaatcaatccacaacctcatcagatttaagatcccacctggcagatgtgttgggggtcccgataacttttaaatctgagctgtaagactgtagaaatcaaacctgtttggtgtgggagggtttctcaggaatagggagcttgagtaactttagtgtttagtttgacctttgtttaaaaaaaaaaaaaaaagcccacacaccaaaagaattttattttttcttgtctttgatcagagaatttcagtaacccatgtttgagttatggtttcatttcatggctgtgaatatgtttctcatcttgtgccctgcctgtgaaattgaccctgacatagttcccatccaagttatttttccctaaaatatgtaggaaatgaataatgcattgttgattattctgttaccaaacaaaagggtcttgcttcccaatgtgctagaagccaatattatgacactaggtttttgagaaaaggacagctttttattgctagtcgactaaccaggagacaggagtccagctcaaatctgtctctctgtgctggctttaaggcaggaattttatcagaaaacgtttagcatctggattccgagatttgcaggtgattggtggaaggaaaagagagatctggaaagtcctcggacacatacagttatctcttcatgcctcctcatgggtctcgtgcaaattcagggggagttagtatgaaacatgcctggaaatccaggctgtgatatccacaagctcattctgtgcaaaatcctgttggccatattgagtctaactgatttcagccagttttgttatcttacaagcagagggagttgcagcgtttcagcaggttttttttttttttcttatctgctgtcctgcaaactcaagaatttctgagagttactggcttctttaactttttctttcttcctttctttcttttctttcttttttttttttgagatggagtcttgttctgttgcccaggctagagtgcagtggcatgatctaggctcactgcagcctctgcctcacagattcaagagattcttctgcctcagcctcttgagtagctgggattacaggcgcatgccactgcacccagctaatttttgtatttttggtagagacggagtttcaccatgttggccaggctggtctcgaactcctgacctcagatgttccacccgcctcagccccccaaagggccaggattacagatgtcagccacctcacccagccttttaactctttgaggcttgatttcttttttctttttttttttttttttttttttgagatggagtctcgctctgttgcccaggctctggagtgcagtgatgcaatctcagctcactgcaagctccgcctcctgggttcatgccattctcctgcctcagcctcccgagtagctgggactacaggtgcccaccaccacgcccggctattttttttttttttttttgtatttttagtagagacggggtttcactgtgttagccaggatggtctcaatctcctgacctcgtgatccacctgcctcagcctcccaaagtgctgggattacaggcgtgagccaccacacccggccaaggcatgatttcacgcctaccctaaaggataaagtctgcaataataggggttagttctgagaactggctgcagctagcaatctattcttttggaacccagtcttttgcctttcatcctctgcaagtgcagactcaatcaacctaagcagatagaggaggctctccaaagcccaggatagaaaatagctttcttgcctggggggagtagttgacttcacacttcaaaaaatttctagaagtttttagcatcgcagttggcatctctctttcatcaaggtgaatatccatcaagaagggatgcagtagagaggaaactcttggattctgaagattccatctcattttcagcttcatcatggatgagctgtatcattttgtgcaagtttcttacatctttctgagctttagtttttttttttttcatctgtaagataagtaatttaatacctgcacccccatcacatcgggatttttctggggatcaaatgcgttagataaattaaacttgaaagctttctttacaaattatttgaatgtagggcatttagtaattctcactactgttggcaacagggagaaattggcaagtttctagtggctggctggctagggtttgcatatcaraatccaactttcatattttatatcgttttcatattttccatctctttaatgcactaaagggtaatctcattgaacttatctcttgtcccctctgtttttctcctcgtatgtataacctatttgattgcttgctgtgttgtaagctctaaagactcttcatttctagaagtttcacttggctatttttcacatctctctgtttatttttcacaaggttttgttcttatggtttttgactcctatttttaggtttttactcgttttgttgttgtttcggttttttggtttgcttgtttgtttgtttttgacaaagtcttgctctgtcacccaggctggagtgcaatggcatgatcttggctcactgcaacctctgcctctggattcaagtgattctcatgcttcagcctcctgagtagctgggattacaggcacgtgccaccacgcctggctaatttttatatttttagtagagatggggtttcaccatattggctaggctagtctcaaactcctggcttctagcgatccacctgctttggcctcccaaagtgctgggattataggcatgagccaccacagccagcctgatttttactcattttgaacattcgtattttatggtgtctgtctaatggttctattatgtcaagttcttgagagttctaatcttactgtatttgctgagtcttacttacagtggattgtttcctcatgtgtttataatatctattaagagctcatctttgatggagcttcagctatgaaattctgggttgtatgtggatttctccggtaagttttctcatttgcttttgctcatcactcctaggtgtcatcttctgaggctactgtgcatgtacatttctaggcttgctgtttcctgactatgtacctaatgtaaattgaaatctggccaggcacagaggctgatgcctgtaatcccagtactttgggaggccaaggcaggaggattgcttgagcccaggagtttaagaccagcgtgggtaacatagcaagaccctgtctcarcaacaacaacaacaacagaaatctcaaaccctcagggacaggtcattatgaattcttgagggacactttttttttttttttttgagatagcatctcaccctgtcacctaggctgaagtgcaatggcacaatcatggctcactgcagcctcagcctccctggctgaagcaatgctcccatctcagcctcctgagtagctgggactacaggtgtgcaccaccactcctggctaatttttataatttttagtagagatggggttttgtcatattgcccaggctggtctcaaactcctgggttcaagtgatccttccaccttggcctcccaaaatgctgagattataggcccaagccactgcgcccagctgacaactttcttttatgcccagcrctcaagaagagacagacaggtttccttgtgatttatgattagagtagattttctgaatgcaagcagcctgtgtgatcaccatctgaacgtcaaagggattcaggtttgcattttcatagctgtgttagaacaaggtactcaacctttctgaacttcagtgtttccaactctcaaaagcagatactcttactcacctaaaagcattgctgtgagaatgaaatgggatcctacatatatatgaagttcatggccttggacctgcggtaaagggaatggtccataaatggtagctgttcttggtcttcccatttcagagatgagaaatctcagaccctggaagtcatggtaccactgggcaagggcaccatggttaggccattagcctcctctcagaaactcttttatgggtccacttacccactttcctgccttgaaacaatagaagaactaagggttttatctttatcttggttttttatttcttaaattctgtttctttggttttcttttttcttttttttcttgagacagagtctcactctgtcgcccaggctggagtgcagtggtgtgatcctggctcactgcaacctctgcctcctggtttcaagtgattctcgtgcctcagcctcctgagtagctggaattacaggcatgcaacaccacacccagtcttattattattattattattatttttgagaaggagtttcattgtgtcacccaggctggagtgcagtggcgcgatcttggctcactgcaacctctccctcccgagttcaagcagttctcctgcctcagcctcccgagtacctgggattacaggcccctgtcaccacacctggctaatttttgtattttaattgagacggggtttcaccaggctgatctcaaactcctgacctcagtgatctgcctgccttggcctcccaaagtgctgagattataggtgtgagccactgcgcccggcccagctaatttttagtagaaatagggtttcaccatgttggccaggcgggtctggaactccctgagctcaggtgatctgcctgcctttccctctcaaagtgctaggattacaggtgtgaggcaccgcacccagccttaaattctgtttcaaacttaagcccggcctctggtttcagcctgcagcaggagtgaaacccgcactgagagaggagagactgtcactattttcattgataatgaaagcagttttctaatgatagaggaagcacaataaaagctatctcataaatggcttttattacccattgtctagtctttcctaaacaataggttattagccatatgtaatagggattgaagctaattgttttccttatttttcagataaagaaatgagttgtacacagtgatttttttaaggacacttatagcactaatattgtgtgaatcgatttagttgagagccatgtgagagagttaaaagttcatagaggagttgggtgcggtggctcttgcctgtaatcctagcactctgggagggcaaggcgggtggattgcttgaagtcaggagttcaaaaccagcctgaccaacatggtgaaaccctgtctttaccaaaaataaaaaawtttttttttwaaaaattagctggtgtagtggcgtgcacctgtaatcccagctacttgggaggctgaggcaggaaaatcacttgaatcaggaaggtagaggttgcaatgagccaaaatcgcaccattccactccagcctgggcaacagagcaggagtctgtctcaaaaaaaaaaaaaaaagttaatagaaactgggtgctttgttcatctctttgttttcttgagtggttgagatgcattcctgtcacactgtgcccccaaatgacaaggacagcaatctttttttatgctttcttgcccatgggttacaggggtttggccttgtggccatgggccacaccatcttttcttttgttgggaggagggaggaaactggctggccttagagttcaacattgacaatctggtagaaggtaattgaatcatggtggtaggtttctcccatgctgttctcttgatagtgaataagtctcatgagatctgatggtcttataaagggcagttcccctgcatacactctcttgcctgccaccatgtaagacatgtctttgctcctccttcaccttctgccacgatcgtgaggcctccccagccatgtggaactgtgagtccattaaacctctttgtctttataaattattcagtctcaggtatttcttcataggagtgtgaaaatggactaatacagtgtcctgtctcttcttcctcagagcggacacctccagaaaggaatgctttcattaaggaaaaaggcagccaaaatcctgtttccatagagtcttgtttaattctttgtgttacatctccatgtcattatcaatgaatcagcctccagtgaaataactgactgcacttgtggtttacgtcactgagccaggaagccagggagtggggtgtgtgggagaaacagctttgcttctgagcctctgggggttatggataggaatgccccttgccagctactggacctggtactgtggtggcctctgtgtatatccctcagtgtgctgtgatcttcaggagggaagggatgatagagtccacgtttcagctggcctttctattactcgagcagagtcgccagtctttctggatatatgttcctttgttgacttgtttctggaatggaattccataggcttttagacctatatggcttgaagaggtgataaaagaaggcatctacaagaccattagaaaagatcttggctgggcacggtggctcattcctgtattcctagcactttgggaggcctaaggtgggaagcttgcttgagcctaggagtttgagaccagcttaggctacatagtaagactctgtctctacaaaaagtacatgagttagcctggcatggtggtgcatgcctgtagtcccagctacttaggaggctgaggccggaggattgaggattgcttgagcctaaggagtttgatgctgcagtgagctacgatcatgccattgcattccagcctgggcaacagagcgagactctttctcataaatagataaataggtagatgaataaatatattacaatatacattaagacttcatgtaagtttcattataccgaaagagtaattgtttttttctccttgagttgtgttagaaaaagttcttttctgttatcacagcttagtatatgccaggcccaggagggaatggggtcataccaagmccctggaagaattttggaggaaaaagaatcttgttctgtttcatgggtcttctgggaatgcagaagaggaggatccgagggaaaggaggttctgagagaaagtagattctctccgtaaaagcatccagagaaagcgtgtggctttctcagctatattctgaccctgctcaagtaataaccatgtttcaacctaaaaccgtctcctgcttgtctttcaatgcacagagctcaacatactttaaagacagaataattagaatgtactatgtacaaaataactactagctcagatgagtcctgccccaatttaaaattgagaacagtgagtgctagtgttatgtttttaaatgaaactaagcaaaaccacttcttttctgattataaaagtcaacaggttcattgtaaaggcatgggaaaaaatttaaagaagaaaataaaagtatcccacaaccttacaacctagaaataatgataggtaactggtttagcatattaccttttattgacctgtatataaataaatattgggtcatacatagctatgattgtgttttgactttataactagcattattacatgagctttttattatatcattcagttgttttttgtttttttgtgtgtgttttttttgttcttttgagatggagtctcgctctgtcccccaggctggagtgcagtggcgtgattttggatcactgcaacctctgcctcccgggttcaagcaattctcctgcctcagcctcttgagtagctgggactacaggcctgtgccactatgcccagctaatttttttgtatttaatagagacaggattttgccatattggccaggctagtcttgaacacctgaacttaagtgatccacccacctcggcctcccaaagtgctggtgggattacagacgtgagccaccatgcccagccttcattcagtattctttatatgatgttttaatagctgcattcattttatcatggactgtgccaaaatatacttaattatatcccaattgatataaatttagaagattttaattttttcattatgatcgataatattttgatttaaagttttgtacaaaaactttttttaaatctctgattttttttatttcctcttctggctttttacaagattttgcctttgtttttaaatttcccattatgatgtatctaaggatagatttctttttatttgttctgcttgagatttgttgagctttgaatatatgtgttcatttccttcctcaattatgggacattcttatctattatatcttctaatatttcttctgccctgtttactgtcctctgggatttcacaaactggtgtcagatcttatcattgtattatttatgttgcctaccctcttttatttattcttcatctttttctccctctgtgcttcattctkcatagtttcttctgtcttagcctctagttcattaatgctctcttcagctgtgtctaatctgctgataaatgatccactgagttcttaatttttgaactttttgattttagatttttctctttttcctttttcaaatatgttgtgctactttttgtgatttccagtttcctgccaaaaattttaagcttgctttttaattttcttaagcacagtaaacatagatgttttccaataagtctgatagttccagtatctggaagtcctgtgcctctcttttgttgtctgttattttcatgcaagtctaacttttggcctcttgattcctaatgcttttgattgtctttgattaggtgttagagatgttagctactgtgtttgaaaaagttatgtatagcctgggcaacatagtgaaatactgtctcttaaaaaaaatacaaaaagaaattagccagrtgcatggcacagacctgtagtcctagctacttggaaggctaatgcactggagcctgggaggttgacggtacattgagctatgatcacaccactgcactccagcctaggggacagagtgagaccctgtctcaaaaaaaaaaaaaaaagagagagagagagagcgggaaagcaagagttatttgtcaagttaatttgtaaccgaggacggtgttacctgcctctagtgagaatttttgtttacttctgccaagagcacaggagtgctcacagcctctgattcccttaatggaaatgcaaggtgtgagattttctgggcttcccagaggaaatgaagtgagcttgcagtttgggagagaggccaggttgactttcaggttgctctttttatttatttatttatttatttatttatttatttatttattttgagtcagggtgttggtttgtcacccaggctggagtacagtggtgtgatcttgggccactgcaacctccacctcctgggttcaagcaattctcatgcctcagcctcttgcatagctgggactacaggagcatgccaccacacttgtctaatttttgtatttttagtagagacggggtttggccatgttggccaggctggtcttgaactcctggcctcaaacaatccacccaccttggcctcccacagtgctaggattacaggcgtgagctgctgtgcctggcatatagcacttgttatatgctaggaaggcactttacaaattctgatacttttagttctcctaagaaccttatacagtaggtaccgtgcctggctgtgactcttttttttttttttgagatggagtctcactctgttgcccaggctggagtgcagtggtgtaatctcggctcattacagtctctgcctcccagggtcaagtaattctcctgtctcagcccccctcgtagctaggactacaggcccgtgccaccacacccggttaatttcttgtatgtttagtagagacagggtttcaccatgttgtccaggctggtctcaaactcctgaccttaggtgatccgtccgcctcggcctcccaaagtgctgggattacaggagtgagccactgtgcccggcccaccaggttactcttaagggcagactttttgtattttagccaaaaatgaagggtggtttaccaggttgcccattattagtgggcactgaaacccaactctcggctttctggccttttgaggtggctagaagtgcaacccagcctctcagtcccgctttatggactggaacacacctcaaggtagaaggaaacccagttgctgggcatctgtctcccttttctagtctcggccagagttcaacctaataattttcattttgttcatctacagtggttttattaagatcaaaaaattttatccaggctggtgtggtggctcatgcctgtaatcctagcactttgggaggccaaggtgggtggattgcctgagctcagaagtctgagaccaccctgggcaacatagcaagactttctctcttaaaaaaaaatgcaaaaattatctgagtgtagtggtatgtgcctgtagtcccggctactttgggggctgaggtgggaggattgcttgagcccaggaggttgagactacagtaggctatgttcgcaccacctccctccagcctgggggacagagcaagaccttgtctctttaaaaaaaaaaaaattwtccagcttttttagtttttttaggctatagagttggtccaaattacatcatctgacagtctcagaggcagaagtcattattatcctttatgataaattcctaagagtagaatttctaggtctaasacatgtttatttttaagacttacgagacagactgccaaattactttccagaaaagttgtttttcatattgaatccttgttctttttcttcccttctcctaagtatctgttggtgtctcaaagttctgttcattcttctacagtaatttaaaacctgtaacacaatttaaattttagttgcaagtcagatgtaagaaagggtgactttatttttccaaataagaattcaacttgctctccagccctcgtgttcactgatgatggaaaagaaaactaatctttttgtttcaaggtaactcagtttcttcccattgaaaactccatctctttcaggacaattgctccattaaatcaagattttgacmggctgttatttgttaagggtcgctcttcccccttgaaagttctccctctcccagctttcctcttaaatagtgcctggaagcaaggggagctggtgctgccttggggcaacgagagaggtgtctgggctgcgcctgtcttctgggacctttctggcttctgttgacacctcccaatcttgagttttgtcccttctgtattcatagccgatgcccttggccctgcttctgaacttcaggcaagatatccacccagtgggtaccctcctgtcccctgactccctttgtgaaccaacctgtctagttctttgcttcctgatatggtttggttctgtccccacccaaatctcatcttgaattgtacctcctgtgtgtcgtgggagggacccagtgggaggtagttgaatcctggggacgggtttttcccatgctgttctcatgatagtggataaatctcgtgagatctgatgggtttatgaagggcagtttccctgcacactctctgttgcctgccaccatgtaagacgtgactttgttcctcctttgcctttcgccatgatggtgaggcctcccaagccatgtggactgtgagtccattaaacctctttcctttataacttacccagtcttggggtatatctgtattagcagtgtgagaactgactaatacacctccccttcgcctggggtactcaggaacttcaggatttcctacaggccaggagctggctgtgggcatttagagcattattttaggtcctctctctgcctaaacatcactccaccattcctgccccactgcccatagcacgctgcaagacaattgcctcccgccagagtgctaggcaggaagcaaaacatccatctctttgccttcccatcctcaaacccatttgcagatttctgtacccactccctgaattccaacgtgagcagtagggtgaggctgaaactcccccaggagagaccttctcttatgtctgtctcttctgtctccagacttattccccagcccarggagaattagcttctgtgtgtgtctgttttgcattgctctaaaagaatatctgaggctggataatttataaagaaaagagggttatttggcttacggttctgcaggttgtacaagaagcatggtgccaacatctgcttggcttctggtgaaggcttcagacatcttcagtcatagtggaaggggaagggggagccagcattacgtggtgagagagggagcaagagagacaagggaggtcctagagtcttcgttaacaaccagatcttgctgaactcattaccacagggaaggcaccaaaccattcatgaggggtctgccctcatgacccaaacaggtcccatcaggccccacccacaactctggtgatcacatttcatcatgagatttggaagggactgacatccaaattatatcagtcttttggggcactggaactttcccatatgtcagtacttctcaaccctgattgtgctttagaatcaaatatggatgtcgaccaatcaaaccagtgtctgggagtgtgcctgaacagaggtcatttttcaagattccccaggtgatcctaaagtgagccagcagtgagcccagcagctttgtcttactgaactcattaccatggggagaacgccaaaccattcatgaggggtctgccctcatgacccaaacaggtcccatcaggccccacctataacactggtgatcacatttcaacatgagatttggaagggagaaacatccaaattatatcagccttttttggcattggaactatcccatatgtcagtgattctcaaccctggttgtgctttagaatcaaatatggatgtagacccatcatcaaaccagtgtctgggagtgcacctcaacacaggcaagttttcaagattccctcgttgatcctaaggtgagccagcagtgagccccacggctttgtcacaaccgccatcctctggcttcaccggtctgctgtccttaatatctaaagggaggcttttggaatttagcaaatgctttctgtctctgatgcacggctcgtgcgcttgaaatccgggcttagggactattgcttcagcagttaacgtcaggaatctattttatagtcacaacagaaaattaacrtctcctttgcttttctttctatctcagctctgacagtcttcccctagatcaaggctaatgactgcctctggatgagatggcaaatccagcatagaaaaagcccattcataagtttcaaaataaattattatactcttttatttgactactttcttacaactattttgctgctactgtagcccttaaatacgcaaggccatcagaaagctgtcttcttacctgaatctcatttggttccgagaacaattgctgtcacctgactgtccttgggtaaacatcataggccaatgctgagaagtgttttaaaaatcagatttgtggagcttattgtatttgctgaagtggtgttaaggagacttggttaaggagaccaagtcactcagtagagaaatttctcttgggtcttagtgatcaagtaactatctttctcttattaaaaatcttttagacactgcagatccagccaacggttctgtctacagtggggatgaaagagcttggagctgagtttgtggcccactgttattaaatatgtaatatgtcagagcctgcattttgtctgctaaactcaccctcggcatcatcttttttatttttttattttttgagacagagtcttacttcatcacccagggtagagtgcagtggcgctctgctctcggctcactgcagcctctgcctcctgggctcaagtgattctcctacctcagcctcccgagtatctgggactacaagctcgagccaccacacccagctattttgttttgttttgttttgtttagagacagggtttcaccatgttggccaggctggtcttgaactcctgatctcaggtgatccacccaccttggcctcccaaagtgctgggattacaggcataagccactgcgcctggcccccttgacataatcttattttgctctttgtcctctaattcccaattaattatttttatttttaacctttttaaagtgaccggttctttctctgtggcccaggctgtagactcctgggctcaagcaatcctccctcctcagcctccagagtagctgggattacaggtgcacaccaccaaacccagctaattttttttttttttttttggggagagatagggtctctctatgttgcctcactggtctcaaattcctggcctgaagcagtccttctacctcagcctcccaaagctctaggattacaggcgtgaaccaccacatcyggtattaattactttcttttcattttgttttatcccatagtgcctgcattgatataggatgtcctaaaacattctcagaaaacttctccaccatgcaaaaatctcaatactctttctttctttttggaaccctgtcagtgttgctagcctgatgccattctcgaatgtacatcctaaagcttttatcaaagttgttcttgcatcagccctggaagttgaagagggattattgccctccttttacagatgaagaggaggctgatccatctttcaagactttctcttcacatgagtccccattcattctttcaaagttaccttcctagctgggtgcagtggctcatgcctgtgatctagcaatttgagaggctgaggtaggtggatcacctgaggtcaggagttcgagaccagcctggccaacatgatgaaaccctgtctctaataaaaaataaaattagccaggcccggtggcgtgtgcctgtaatcccagatactcgggaggctgaggcaggagaatcgcttgaacccgggaaatgaaagttgcagtgaaccgagatcgcgccactgcactccagcctgggtgacagaatgaaactcttaaatacccgggcgcagtggctcacatctgtaatcccagcactttgggaggccaaagcaggcggatcacttgaggtcaggagatcgagaccatcctggctaacatggtgaaaccccatctctactaaaaataacaaaaattagccgagcatcgtggtgggtgcctgtaatgtcagccactcaggaggctgaggcaggagaatggtttgaacccaggaggcagagattgcagtgagctgagatcacgccactgcactccagcctgggccacagagcgagactctgtctcaaaaacaaaacaaaacaaaaacacaatcacctttctgccagtctctcccagtccagagactgtactctcctccacggcttcatcttctagcacagaggttggtgaaatttttctctgattggctggatagtaaatccaggcaaaatcaaggatattatgtgggtacttataaacaaagtgcaaaacctgatttctacaaatattttattgacaaaatccaaaatgtaacattaatgagtctaggttttttttttggtaatctgggtctactaatgagaacatttgaattttcgtgtgtacaggtgacatgttgctttgtttaggttcaaagttagtgttcccatcatcatcatcaaatcagttataagtgttcatctgttaaaaaaaatccttaattctctggccagacaaaaacaggcagtgtagtttgctgatgatgcctgttctagacctttctctttttcttttccccaaatgttcactcaaccatgtctcatctcacaagatagctaaccagacactttaaaatatatatacacagtatatataaagtgtcgatggctgacaacagcttaatgtgtcaccacttcttaagaagcatagtgcatttacaaaaacactcttccaaggcttatttgcaaatcagtttctcaaagcttcaaggaaatatgattaccaaaaagtaaaagtattatcccgagaaaattgcttatagggaatatcttactagggagtttcgatgtggatctttgttttaataaaacaagcccagacagaaatcagtcagccaaggaaatgagttttgagactggcaacttcagtcaccactggcgtttttttctgcatctgtgaaaattcacaccccacagagatgaggcttcctttatcctacaaaaggaaatgctcttaattccttgacagttccctttccaatctgaaggaagttgttgtttcagcatgaattatcttttcagcaacaaaggtgaaagtgctacttccacttaaaggcaaagcactggcctttgggtcctattttcttgtgagattatttgtgagctggatgcagtgtttgattgttttaaaaggcagccgacttgtccttttggtatttatatgtatagcagaggcaattggaactctgggcattaaattaccgtaatgtgccagttgagaattctattcaagccagccaactccttcctcaaaattatatttttagtgtttagcagctgcaagttcccagaaatcttcaaagtgggatcacttatttcacccagtgcaagagctcttagctgctgccagtgtgagatgatctggtctgggaggcagttgggtacctgggaggggcgagagatcagaggccccctgggttgcccttagttctgcacttatttgcatatgcttccccttggtcaggttactgaacctctgagcctcagttggaaaatggggctaataatatctaccaaatggagctgctttgaggattcaaaataattatgaatcaaccaggcgcagtggctcacagctttaatcccaccattctgagaggccatggtgtaaggatcgcttgaggccaggagtcggagaccagcctgggcaacagagtgggaccttgtttctaccaaaaggaaacaattcgcagggcatggtggtgtgtgcctatagtcccagctatttgagaagctgaagtgggaggattgcttgagccgggagatcgaggctgcagtgagccgagattgcactactgcactccagcttggagtgcaggttcttttttctgtcttatgtattaaaaagaaacacattttcaacattaaaaacaaaaaaaaaaaaatcagccaggcgcggtagctcaygcctgtaaatcccagcactttgagaggctgcggcgggcaaatcgcgaggtcaggagttcgagaccagcctggccaagatggtgaaacctcatctctacaaaaatacaaaaaattagctgggtgtagtggtaggtgcctgtaatcccagctactcgggaggctgaggcaggagaatcgcttgaatccgggaggcggaggttgcagtgagccaagatcatgccactgcggtccagcccaggggacagagtgagactccatctcaaaaaaaaaaaaaaaaaaaaaaaagaaagaatcacaaattgtcctaaggtagcagcagatgcattgagatgcccagtaaagggtgctgttggtctcagtgatgtgctcctatctcattctcctcctccttccctgcctggtcttttggccaccgtggcttaccgttatccccgcaaaacaggatccatttgcttggggagtaacaagcaactccccatgagaacacaggctttgatcaatagggaattgatcacttgtcacaaggaaggagagcatgggagtatcctccaaagcagtgtctcccgtgggaaagtgacaggagggttttatggaatgatggagaggggagagggtgtgtcatcacatgcagaggaggggtcctagtggcgcaggcacagggagccatcatgccttcgtgccagcacccaggttgcatgtgatggtaacggagctgtagctctctttagcaccgtcatgagaaagttcacttgagttcatctataaatcgctgggggaggtctgtcaggaggcggtgttaaccaactaggtgaccatatagggtttaggaagaaacaggcttcagggcaggagcctgtaaaacaggctgattgctcaaattgagyacattcctataatccctggagaccctgcctgtttgcttacaatactggtgcctgtgccagtgggtatagattggatgtgtgatacaaccaaagaagggcaacatctgcattggacatttattctactgtattaggagatggtgtaaaagaattcaccgttgctgatgtaacaaaatgcactgaaatgagtgaatttgtttttgtttttgttttttgagacagagtctcgctctgtcggccaggctggagtgcagtggcatgatcttggctcactgcaacctccacctcccgggttcaagcgattcgcctgactcagcctcccgagtagctgggaccacaggcacgcaccaccatgcctggctaatttttgtatttttagcagacacagggttttgccatgttgcccgagctggtcttgaactctgacctcaggtgatccgcccacctcggcctcccaaagtgctgggattacaggcatgagccactgcacccagcctgaaatgagtgaatttgcattaaccaacctactgattgccaaagaagttggcggtactacgaaaacactcagtactgattataccttgagggttggatttgcagacattcataccaggacaactccaggggtgaggatgagtgttttgcacgtgggaccttggaatgagaaagtgcttagcaaacagctgaagcagaactaagaccaaagaaaacggcagcctgtttgagtctgaggtcagagaaaagcagcaagtcccagcaggccagtgggaatcaggaaatagaaaatagagtcagcccctgatccctgggtcaggaaccatcatcatgatagaatttggagatatggctgccagagaacagagaccaacgggtggctggggtctaagagaatgtcaagagatgacaggtgtcagggaaaagcaagggtaagacatgacaccaccaggacttgtgcccaacaggtgactgagacagcgagccacatggtgacaagcaggcatccaagcgggagaatgtcaccaaacaggggaatgaggggtgggtggaagacactggtccaaaggggctgccttctggtacattctggagatagacactcccctgatttacaggctatggatcagcagattttgttttgttttttgtctttttttttttgagatggggtctcgctctgtcacccaggctggagtgcagtggtgcgatcatagcacactacagtgtccaactcccaggctcaagtgattctccagcctcagcctcccaagtaactgggaatacaggtgcgcaccaccatgcctggttatttttttaaaaaattatttttggtagaaatacatagtctcactatgctgcccggtctgttctcaaactcctggactcaagcaatcctctagccttggcctcccaagtgcaaggattacaggtgtgcaccactgcatctggttcacagtctctggtttctagctccttcttttctctccaccactggagcctgctcttcccatacctacagcctcactcattgatgtacaacacagggacacaagccttcaaccagaaatcattattattacattgtaatatataatgaaatagttctacaactcaccatcatgtagaatcagtgggagccctgagcttgttcctgcaactagagggtcccatctgggggtgatgggagacggtgacagatcatcaggcattagattctcataagcagctctcagcctagatcccttgaatgcacagttcacaacagggtgtgcacacctatgagaatctaatgccgctgctgctctgacaggaggcagagctcaggcggtaatgcgagtgatgggaaacctcatctgtcagtacagatgaagctttactcacttgcctgccactcacctcctgatgggcaacttggttcctaacaggccatcaactggtgctggtccatggcctgggggttgaggacccctggtatagagtagccaggcgaaaggatctatagggttgatggctggaaaggaattaagagaggcagagatgccaaggaagaacttgtacttaattcagaagggaatagtgagccactgaaggctttagaggaggggaagcatctagaatgaagatgagtcctttttcacctatgaaaagaaaacacaatgagctcaagaaagctgtatatgtcttggtgcaaatatcgggctgccaccctcttctcactgtctattccttttctgtcattcagttggaactgttgtgtgtgttgcatatatttctgtaacagcaccaataagtgattatttttaatttctgttcttctcttctgtaatggagctattaggctttggcagatcccttaatatgattatcatttttgaatgattttgaattgaagtgtttgcactcatggtcgtaatcgcagttgactttgaaggatgaggctggagactcacgttctctgatctcttcagcccgcaagtggtatcaactgcagcttccacagctgggtaggtggtggggacaccttggaagggaagcagcagccgtgctttgctcctgattgtcaggatgaagtggctggcctgccactcacgaggcaggtgccagatgggatgggtggtagcttcctgttggaggactgcccctccccagtcagaggacaaggacagctcctcgtttatcagtccaggcaggtagctccagaatacaaagcaggtgcccactgagctcgccagcaacgctgactggcctgtccatgggcagatatgtcttttttttttctttttaaatttgttttgagacagggtctcactctgtcacccaggctggagtacagtggtgcaattgcagcctcaacctcccaggttcaaatgatcctcccaacttaggctcccaagtagctgggactataggcacatgccgccacacctgactaattttttatttttcatagagacagggtctcgctatgttgcccaggctggcctcaaactccttagctcaagcagtcctcccaccttgacctctttaaagtgctgggattacaggtgtgagccaccatacttggctaattttttaattttgtgtagtgatagagatttttgtactttttgctttgttgcctgagctggtctcaaactcctgagctaaagcgatcctcctgtctcggccttccaaagtatgaggattacaggcatgagccaccctgccagggtgatatgtcctttcattatttaatgtcctccacaatgatccagttagacattagccacgtggcaggggtcttgccagctcccagcactatagggaagacttggtgtttgcagaacagaggctttctgcttctgcttccagggagggtcacctgctggggccagttccagcctctcctttccagcctctgtcaggctctgtaagcagattttgatcgtgacgggcaattttctttctttttttttcttttcttttcttttttttttttttttttttttttgagatggagtctcactctgtcacccaggctggagtgcagtgtggcatgatctctgctcactacaacctcctcctcccaggttcaagtgattttcctgcctcagcctcccaagtagctgggattacaggtgcctactaccacgcccggctcatttttgtattttcagtagagatggggtttcacatgttggccaggctggcctcaaattcctgacctgaagtgatctgcccacctcagcctcccaaagtgctgggattacaggtgtgagccactgcacccagccagttaggacaattttcctgtgacaccaacagcgaccatcgtcacacattcattccacatccccgctgcactgggcttacctcctgcccattcatctgtgggttctgatgaggcccgcctgggacacaggtggaggtctggtttcccacagcctcctgggcacctctgggctgctgacctgccctggcctggtttgaaggaagacataccaaatggagacctcaccactttgttgtgagaaatcccaggactcagagaaccctgtcatgtgtgctgagcagagctgtttccagcacagaggggactccgggcaagtcatgctgcgaagctttctctcattaccacacacagccacagacaccatccagataaaacccagttacattaaagtatcaggctgggccgggcacggtggctcatgcctgtaatcccagcactttcagaggctgaagcaggtgaataacttgagatcaggagttcgagaccagcctggccaacatggtgcaaccctgtctctactaaacatacaaaaattagccgggcatggtgctgggtgcctgtaatmccagctacttgggatgctgaggcaggagaatcgcttgaacccaggaggcggagactgcagtgagctgagatggcaccgctgcaccctagcctaagcaacagggtgagactccatctcaagaaaaaaaaaatcaggctcctgacggggaaagatgttgcccaaagggtaactgagagggatctgaagaagagggagcctgtctactcccctcctcrgtgaaggtgatgtgatgagcttctgatccctctgtctgctcccctctttcctctctcctttcctctccccttctctactgtcctctccttcctctctctagcacttcatcctgctctcccttctccatctttcatccctccctcccacccctagttagagcacactcccctgatacccagttggtccctgaggcatcatggtgctcttccctaccaggagtcctccccagatctgttctgcacattcattcactcaacagtatttggtgagtgctctagctgctggaaataccaygagaaatgacaggcataacttctctgctctcagggagatacctgaacatctggtggggtagaaggctccacagccacagcatggtcccacagatacaaacacaaatctctgagtcccatctctggacccagtccatagttctggaccagacccaagaagctgcatttttttttctcttctcttttcttttttttttttttttgaaacggagtctcgctctttcccccaggttggagtgcagtggtgtgatctcggctcactgcaacctctgcctcctgggttcaagcgattctcttgcctcagcctcccragtagctaggattacaggtgcgtgctactaggcctggctaattttgtgggttttgtttgtttgtttgtttgtttgtttgtttgtagtagagacagggattttcccatgttggccaggctggtcttgaactcctgacctcaagtgatctgcccaccttggcctcccaaagtgccgggattacacgcatgagccacaccacacctggccagaagctgcattttctaaggagttattgggttgatgctgatgcagtcagcccctagactgacctctgggaaacaacttttctgcacacagggcaatgcccaaagccaccgctttgggagagtttgtggcctgggcgctttctgtgattttaactaccctgtttgcctctgagaggttagaaagcagagtcttagagcagggtcttcactacacactcttgtcaatgttgggtgttttcagactccaagcataggcttttggggagattttttgtaacttatcagaattgcttgatgtgctcagaaacaccctctagaaaatggagctaacgccgaggacatctcccagtcccctgcttctgtgctgatgccagcatacccagggacctgtggcactagcatatctccataactcgggcagactctgattccggctcttccagaaggaatcttccctgtagccttcctcttctagctgcgagataaagcttttttttttttttttttcctgctctggatcataagtaggaggggttagcgtaggtcatcatcaccgtttggttgcaaagaacggaaacttatctaacactgtttatgtggagaaggaccgattgcaaagacacaaaggaccctcctgtaacttaggggcggagagcagagccagggctctcagcagatggaaagccaggattcctgggtggccagtcacccccacgtccatgtagtctccattgtacatctgcctcctccttctgctcaatcatccgtgtgcatggagcccctcaggaactgctcacggtggcggcctgagccctgaacgcgtgtgagcctattgagttctagctcccagagttgtcttcatttccaaagccaccccttcaggagaaacctaattccaagcttcagaggaaacataatttgtcctggcttgggatcagtgctcattttctggtttggttaactgaggccagggaatgggctcatttgatgcttttccagactaaaggtcaggctgcttctctaaaaggcgccaagagctgggaggaaatgatgcacattagaagccatgctttcccctggcatagtccagggtgaacctgctacaccagcaggagcaaggtcccgtttgcataagtgtgattggcatgcgatttctgtaaacacacagaagggcacctcccagtaagaaggtgaaggcgcattacttattgagctcctgctctgtgcactgggcccattgcaggttttctcttgtttaatccacacaacaataccctgtagagatttttttgtttgtttgtttgtttgagacggagtctcgctctgtcacccaggctggagtgcagtggtgcgatcttggctcactgcagcctccgcctctcaggttcaagcgattctcctgccttagcctcctcaatagctggggttacaggtgcacaccaccacgcccagctaatttttgtatctttagtagagacggggtgtcaccatgttggtcaggctggtctcaaactcctgaccttgtgatccgcccacttcagcctcccaaagtgctggggttacaggtgtgagccaccgcacccagccccttgtagagatttaacaggaatctagagtgctccattgacttatgcaattatagtcttcggtggcagcaccagcgtttaactacacatttcatgcttgtgccaccactgaaggtgaatgaagaggctcatccactgctgcctcaccacatgggtaccaagtggctttccatggaatcagaaacctggatgtgaaggtcgaagtcaagttagaagtcataaccagccgatgagggtccgagactacagtccaccctttggctccaaagaattccacctaatagcttcctggtggccccagtggagtttcaatggacctcctgcgtgaggtgtctcttttgcccagggaagcaccttaacggtgtttctggcctttggcagtgggggcatttgccagttcctccatgaagccttttctaaagcgtgcagtaaagcaaaagggctaaaatcaagggctttgaaggcaggcagatgctgagttctattctgtgactcagggcaggtcacctaatctccgtgtgcctcagtcgttcagtggagatggttctgcctccttcagtggattgtggcagtgcatacacgagatgtgcgtggaaagtgctttgcatcttgtgcttgagacaggaaattgctaaataaatggttgcaataacaatactaatttttgtattattcttatattcactcttagttgctcggatgacagaggcatgtctgctattttcccatctgctacagcaccagcaaaatgccttaaacatctttatctccatgtgtacccaatgtttagctccaaattacaagtgagaacatgcggtctttggttttctgttcctgagttaatttgcttaggatagtggtctccagctgcatccgggatctagagtacatccagccatagcaaagggcatgatttggtagatgctgagcaaatatttactcaatgaatttattatgtaagggtgactataaagtctggaaacagaggcaaaaagatataataaattatctattgatactatactacaatgcacaatgtaatacaatacaatacttaatatttatcagtgtgatttttctaatttacaatgcatggtcccatgcatcatacaacattgcaatgaacgtggtagaataatgcagcattcctgtcaaccactgcacatatatgcatgtgtggtattgtctcacatgatttatcaattgattgattgattgattgatttttgagatggagcctcactctgttgcccaggctggagtgcagtggtgcgatctcagctcactgtaacctctacctcccaggttcaagtgattctcctgcctcagcctcccgagtagctgagactaaaggcacgcactacaatgcctggctaatttttttatctttagtagagacggggtttcaccatgttggccaggatggtctcgatctcctgaccttgtgatccccctgcctcggcctcccaaagttctgggattacaggcgtgagtcatcgtgcccggctctaacatgattttttaagaattttggatacaagaggtacacgtgcagatttgttacatgggtatattgagtgatgctgaagtttgggcatctgttgatcccatcacctaaattgtgaacagagtacccaataggtagtttttcaactctcccctctccctccctacctgcttttggagttccgaagtgactattgttaccatctttatgcctgtgtgtacccaatgtttaactctcacttacaagtgagagcgaatggtatttgattttctgttcctgcattaatttgtttgttagctcggccagaagatgcattgcattttcaaaggagctgttgggttgatgctgatgcagttggtccctggactgaactctggggaacaacttttccacactagtcttgaatggctgtgtccatgctgcagcaaagggcatgatatcgttcctttttatggctgcatagtattccatggtgtatatgcaccacatttttttttaatccagtctacaattgatgagcacatgggttgatttcatgattttgctattgtgaatattgctgcaatgaacgtaggaatacaggtgtctttttggtagaactatttattttcctttgggtagatacccattaatgggattgtttggttgaatggtagttctatttttagttctttgagaaatttccaaactgctttccacagggtctaaactattttacactgccaccaatggtgtgtaagtgttttcttttctccacaccttgccaacatctggtgggttttgtttttttggttgttttttttttttaactttttaataataattgttctgacaggtggcctcacatggttcttgtctctaattttcaataggtcaacttgtgcctttagccttccccagaagaaacaaccaaggggatgaatttatacaaaaataaaataatcctttgtcccgacttcatggttactctacacgtgctctctttgtctctcctgctgagacctcctctctgcgggctgaggtcatgcccttgccatttatgatggatacctttaggcactaggatgtgtttcctccctgagtcttctcccttctctaaagaccccaccctggtccactttcttccagcataacgtggaaattggagcccttgcttgcaatcttcckctctccagtttcccattgcactcctaacttgctcattctctttttcctggggtggggagtggtgcatcttgcttctcacctccaagcttctttgagactgcacaaggaccccccatcccatcactcagctgtcaacagagtgcagcagggaccgcttcctatgtgtgcagacgccatgggatacgggagaccagcccttaccccatctatgagggagtcacattatccctagatgcttttgaagctaaaagacagcctcacaggctgggcatggtgtttcatgcctgtaatcccagcactttgggacgctgaggtgggcagatcacctgaggtcaggagttcgagaccagcctgaccaacatggagaaaccccggctctactaaaaatacaaaattagctgtgcatggtggcrcatcctgtaatcccagctactcagggggttgaggcaggagaattgcttgaacctgggaggtggaggttgcggtgagccaagattgtatcattgcactccagcctgggcaagaagagcaaaactccgactcaaaacaaaaacaaaaacaaaaaacagccttacagagtaacagagagaggaggtgtgggaattgagggaagtgacttgatttgctaggctggaaccagtacatgctaggctggaacccagtacatrctaggctggaacccagtacatgctaggctggaacccagtacatgctaggctggaaccagtacatgctagaccggaaccagtacatactaggacggtgcctatggaagggcttctggcactgacacctcaatgagcttcccttctttctccctccctcaggaccccagccatgataggctgctcgttcgtggtcaacaggaagttcttcggtgaaattggtcttctggatcctggcatggatgtatacggaggagaaaatattgaactgggaatcaaggtttgtgacatggtgtcccttcctcttggtgtgcccatgtttgtgagcagagcgtcttggtcatccgtggggtgtatttaaagcttcttacagctgatgaatgacagattcatttactccaccttgttcctgggggatgcatgagctgcactgtcacccctccttatgtagggaaacctgggctttcccctgtctaaaagttggctgataggtttcatgccattgctacccactctgggcattagctggagagggtggttcccactcccattcagttttggtctctccttaaatttttcttaaatgatctccttaaattaatattttcaggccaggcacagtggcttatgcctgtaatcccaacactttgggaggccacggtggtgcgatcacttaagaccaggcattcaagacaagcctgggcaacagagcaagaccctgtctctacaaaaaataaaaaattagccaagcgtgatggtgcatgtctgtgtcccagctcctctggagactgaggtaggaggatggcttgagcccaggagttcgaggctgcagtgagctatgatggcatcactgcactctagcctgggcaacagagcaagagagaccctgtctctctcacaaaggcatttgtggtttagtttttacatccgcagatttatttttaacagttttattgagatgttattgacatatacagattttggtggctcacacctgtaatcccagtgacttgggaagccgagtcaggaggatcacatgagcccaggaattcaaaaccaggctgggcaaagtaggaagacgctgtctctatgaaaaataaaaaaaaaaaaagctcatatatataatcccagggacttcggaaaccaaatcaggggggtcacttgagcccaggagttcaaaaccagcctgggtgacataacaaaaccaccatctccacaaaagataaaaaattagccaggtgtgattgtgtgaacctgtagtcccagctactcaggaggctgaagcaagaagatcgcttgagcccaggagttcaaggcttcagtgagccatgattatgccattacactccagcccaggcaacagagcaagaccctgtctcattaaaaaaaaaaaaaaaaaaaaaaaaaaactacatgtttaaggtgtacaggtgatgtttggatatacatatacattgtgaaatgagcaccacaatcaaactgagtgacacatccattacctccatctaattaccactgtgtgtggaggctggtgagaagatttaatttaagatctatcctcttagcaaattaaaagtctacaataccatatcattaactgtggccaccatgctgtacattagatctccagaaatgattcattttgctttgcagtgacgtggcaggaaaagtctgagtgtgaggctctgcaggcttggtggtgatggtggtaactgcttagcaggcaagactgtgtggctgtccccaatccctaaagcaaggaggggactcctgggtccttccccagcagcacagtcctgtccaccaacacccctgtacgaccagaytgtgggatcatgtagattctcccttcactccctattttttgtttttttatttatttattttattttattttattttatttgagatgaagtcttgctttgttgcccaggctgggtgcagtggtgtgatcttggctcaccgcaacctccatctcccaggttcaaacgattctccggcctcagcttctcaagtagctgggattacaggcacgtgccactgcacctggctaattttttatatttttagtagagatgggatttcaccatgttgaccacactggtcttgaactcctgaccttagctgatcttcccgcctcggcctcccaaagtgctgggattacagacatgagctcccatgcctggcctttaattaattaattaatttatttatttatttattttttgagaagtagtcttgctctgtcgcccaggctggagtgcagtggcgcgatctcggctcactgcaagctccacctcctgggttcacgccattctcccacctcagcctcccaagtagctgggactacaggcgcctgccaccttgcccggctaattttgtttttgtctttttagtagaaatgggatttcactgtggtagccaggatggtctcaatctcctgaccttgtgatctgcccacctcagcctcccaaagtgctgggattacaggcgtgagccaccacacctggcctattttattttttatttttttcttttaactttcattttaggttcaggggttcatgtgcaggtttgttatataggtgaattgtgtattacctgtattgataattgacacctcaatgagcacagattggtgcacagattattacccaggtagtaagcatagtacctgataggtagttttgatcctcaccctcctcccaccctctgccctcaagtaggccccagtgtctgtggttcccttctttgtgatgatatgtgctcaatgttcagttcccacttatacatgaaaacatgcagtatttggttggatgttcctgcattaattcgattaggataatggcctccagctccatccgtgatctccttcttcttacagctgtgcagtattccattgcgtacatgtacaacactctctttacctgttctgccattgatgggtatttaagttgattccatgtctttgctattgtgaatagtgctgcaatgaacatacgtgtgcatgtgtctttatggtagaatgatttgtattcttttgggtctatacccagtagtaaatgagatactgggtcaaatggtaattctattttaagttctttcagccgttgtggaaggcagtttggggattcctcactccttgttgatgggctggaatgaatggtccctgcagagcccagtctgcccccaggcaatttctccctggctttgtctccatgacaattcagctcccccactgctcagggtaggtctttattaaagtgtcacttgcatcagggtcatagatgtcactccagagtgcaattacctgcctcttacagtacttcaaggcatctccagcttctggagatgggggaataattttgcctcttaactttccatagaccacatcatcctgcaggctgcaaggtgatcttgacataagccttggttttctgccagttcttaaagtgggattgagtgctgctggttgcagaaaggcaaaggtctgggtttggagtctacacagawttctctggttctcatgtttccagtcagaagcattcacctcacctgggaacttgttagaagtgaaaattcttgggccccatcccagacctactgaatcagaaactctggagtggcagggagtccagctccctgtgtttaccaagccctcctaccccaccaggtaacttagttatgggcccttgttggagagctactggtctacccctaggtttagccgacttcctggcaaatgcatgtcctttagcagaaaggagcccaggtgagaatccacctctttctagtcccttctccaggtgcccttccatggccacactggcccaaagtgagtcctttcttctcactccagcctacacagccagagtcctgtaggcaccagcatctactacctttttaacttcatgtacgggtgtctcgaccaggtgactacagggttcctgatgacagagctccgtttttcaaatgaaataatatacacaaggcacttctgagacaatactacttctcctttcattttgtgctattttgtactacttagggcttgaatgaattgcataataaatgcattcttaagaaatccatccccaccgcctgaataaagaagcagggctttatgtaaatatatatacatgcatatatataattttcatgtagtgtacacacatacatttacatatacaagcttacctgtaagtaatgacccaaaaccctatgctttcattcaatggaaaatttttaacatgagaacactattttcttgattttttttttttttgagacagagtctcgctctgtcgctgaggctggaatgcagtgacgcgatcttggctcactgcaggctccgccctcgagttcacgccattctcctgcctcagcctcccgagtagctgggactacaggtgcctgccacctcacccggctaattttttgtacttttagtagagacagggtttcaccgtgttagccaggatggtctcgatctcctgacctcgtgatccgcccgcctcggcctcccaaaatgctgggatgacaggagtgagccaccgtgcccggccattttttttttaaaccaagaaatggctcaatctgtgatctttctaactagtctttgaaattttgtgttactttttaattccatcctcagtaagtaaagatctgtcagaagaacacaagaatagaaagtcttactgtgaacaaaaatagcagttgactctagggctcttgcctgcatgaaaggcaacttgcctgtgactaaaacaatcaatacagaaaagaagtttttaaaaaagccagaattgagaaaataaatgagatggaaattgaaaggtttcatcttgttctgagtaatagtaatcagaaactattaacaaagggtattatagtagcatgtctaaatgttaagagaaaaaaaaattctccaaggacagaagaaaagataggttactttaaaatgatgtaaagtcattctctaatatatcagtccatttacgaagaaaaggcattctcttcttctgttctcttatataaaaacatggcacccaagactgctgcgtcctgctggggagtcctttctaaaggaagacaagggagacacactttcagatccccaaatgaccaaagactgtcttgactttatcacgaatcccaaggactgaataaaaggcagaattcttgtgtggatgcattgaattgtgaaaacatttgtgagaatgatttatttattttgggtgtatatccagtaatgggattgctgaattgaatggtagttctgttttaagttttttgagaaatctctgaactgctttccacagtggctgaagcaatttacattcccaccagcagtgtacaagtgttcctgttctctgcagccttgccagcatctgttgttttttaactttgtgtgtgtgtgtgtgtgtgtgtgtgtgtgtgtgtgtgtgttttgtttgtttgtttgttttttgagacagagtcttgctctgttgcccaggctggagtgcaatggcacgatctcagctcactgcaacctccgcctcccaggttcaagtgattcttctgccttagcctccagagtagctgggactacaggcacacaccatacttggctaagttttgtrtttttagtagagacagggtttccccatgttgcccaggatggtctcaaacttctgacctcaagtgatctgcccgcttcggtctcccaaagtactaggactacaggcacgagccacgctcctggccttgaatttttaataatagccattctaccaaaaagacatctgcattcatatgttcatcacagtgctattcgcaatggcaaagacatagaatcaaccaggtgcctgtcaacagtggatgggataaagaaaatgtggtacgtagacaccacagaataccatgcaaccctaaaaaagattgaaatcatgtccgttgcagcaacatggatacagtgaaaggccattatcctaagtgaattaacacaagaacagaaaaccgaataccacatgttctcacttatacgtgggaactaaacattgggtacccatggacataaagatgggaatgacagacaccagggactactagagtggggagacagacagcagccaagggttgaaaaactacctattgggtactatgttcactacctgggtgatggcatcggttgttcctccaaagctcagcatcacacacaacacccatgtgagaaacttgcctatgtatcccctgaaactaaaacaaaagttgaagtttaaaaaattaatacaagaaatgagctctccattcccagacacacacaaacacacrcacacacacgcaaaattttgacaccagtaagccatcatggaggaaaggatataagagggtttgaggatgctcaagtgagataaccttcttgccgattccagcccagccctcagggcstttccatggttcagcccctgcaggggtcttcttgttgggttccctgttgctccataacagtcaccaggaagcgattcagactctgagtccgtgttggcttagatgagtcatgatgagtgatgggcaaagaacaagygtattttaatttgcactcagggtaaacataacatycttaaaaagcagagtttaacccagatgccttaattgctggttgcatagctcaagatgtctctgagccattccatttctctgaggagttggagtgccactttcaggactcaggtggagacatggttagaactcctgccatcttgtctagctctgtccattcaagctgaaggcactgaagacctggggggtggttcgcagactcagggtttcatagtgtctgagccaactgagatcacatcagcagtgggttttgaaggcttgctccttcggaggggttgtttacatttatttatttatttatttatttatttatttatttatttatttattttgagatggagtttcactcttgttgcccaggctggagtgcagtggcgcagtctcggctcactgcaacctctgcctcctgggttccagcgattctcctgcctcagcctcccagctagctgggattacaggcacccaccaccacgcctggctaattttttgcgtttaatagagatggggtttcaccatgttggtcaggctggtctggaactcctgacctcaggtgatccacccacctcggcctcccaaagtgctgggattacaggcatgagccatcacacccggcctacaatttttatatatatagacaaattctcactgtcatctaagctggagtgcagttacaaaaattatagctcactgcagcctccaactcctagaatcaggtgatcctcctgtctcagcctcccaagtaggtgggactgcaggtgcacaccactacaaccagctaattgttgttttttggttcttttgtagagatgggggtctcactatgttgcccaggctgatgtcaaactcctgacctcaagggactgttccatctcagcctctcaacatgctgggaccacagccgtgagccattgtgcctggccttatatagaaattatgagccatctggaatagccaaagccccaggaacctgaatgaaaacagcatttcccactcccacaggtctctttgccctgtctcttgttcttagttttgcttccctcttgtctacagctagctcttgcaaggccttctgcctgccctcctgatccccgccctagccacttctctatggttttagggacccatccatccatgttaaccaagagagatttccccctgccttctctgagacctctggcatcaggaaccctgatgtcccaaagccttctgtggcctgtgttgtccatttggaactctcgagctcaaatttgctacatccattgaataatgtaatttgcatcatggtccatcccagagaggaccagatgatcagtccgttttcattttcatactttttagattgcatgagtctttgttctctcacctattggcactggtcaaggttggatccaaggcctggtgtgaaggaagtcatccttggctatgtgaatacctttgtagggcagagcccaagtttatctgtgatacagatcaaagcaaagttcctggtcttgtcccagtatagagtgagccttgagatttcacaaactggtctttcatggaggggaatgtatgactggtggccaacagttcaactgaatacttctgattaaatggaaacttggtgagtgccttctgtagcccagcaggcatttccactggagctaccacagtcaatacatggggtctctatctccatgaaatttatagtcagacagaaatactgttcatgaaataaataattagcactgtgatgagtgtgaaaaaacaagatagagcaatgctgtgggaaaatatagtaaggaaatatagcctagtctagggagttgggaggaaccttcttacggaaatgctgtttaagaattctaaagtgagtttaatatagataagcaaagaaggaggtgtgcaaggaagaatattctagacagaaaaacatctgcaaagatttggaattctgagagataaatgtgtcctgaggaccttgggagttcaggatggttagagcagagaaagggggaagaaaacctcttagatgcagcgacaaccatcaaggtggggcccagattatgaggattgataagcagaaagttggctttttcttaaggatcactgtagacattttagataggtaggttaggtagacaaatagataggtaggtaggaagaaagagagagagagggagagacagagacatgatagatacatagattagagagagaaagatgcatggatgatggatggatggatggatagatagagggatgatagagatagatgatagattaatgatagagatagtaggtaatagagatatagacgatagagatgatggatggatagatagagatgatggatagaatgatagattagatagatgaaatatataggtatggatagattgatagattatagattagattgataatagagataacagatagatggatagatgatatagatagatgagatataggttagatagagatgatggattcgatagatgattgatggatagatagatagagatgatagactgattatatagacagataaatagatgatagtttgatagattagatagatgatagataagatacatggatgatagatgtagatgatagatggatacaaagaagatagatatagatgatagattagacagatgatatataaatagatgatagataaattgatgratgatagatagatagatagatagatagatagatagatagatagatagatgagacatagatagtctcaagtacccattacttaccacccttgaggggatttaaaagaagtaagaggattagacttttctttttactaaaaagataatgatgacagccatgtggaaaatagatgataaagctgcgtacactcaggaaaagctggtgaggaggggcttgacctatatggttgtgacagtgggagaggaatggacaaattcaggaagtggaagagacaaggcctggagattgagtgtatgcaggggatgaagagaagtgggagtccaggctgagcaggtgggaaatagtgttgctgttctctaaggagcactgttggaggaggtttgggagaaggtggaaagattatatgataaatctcatgtttctgagacaccccaggccagcccagaggcatttgcatgtgtggggattaagccaaggagggagcactaagcctgagatagacttggatgtaccggtgccctttaggaggtgtgatagacagagagtggttgtattaatctgttcttacactgctataaagacatacctgagactgggtaatttataaacaaaagacagttaattgattcacagttgtgcatggctggggaggcctcaggaaacgtacaatcatggtggaaggggaaggagaatcaaggcatgttttagctggtggcaggagagagaccaagcaagggaggaagggctaaacacttttatgttttgttttgttttgattgagacatagtctctcgccctgtcacccaggctggagtacagtggctcaatctcagctcactataacctccatctcctgggctcaagtgattctcatgcctcagcctcccaagtagctgggattacagatgtgcactaccatgctcggctaatttttgtatttttagtagagatggggtttcaccatgatggccaggctggtcttgaactcctggcctcatgtgatccacccgccttggcctcccaaagtgctaggattacagctgtgagccactgcgcccggccacgtttaaagcatcagatctcgtgagaactcactcactatcataagaacagcatgggggaaaccaacccccatgatccaatcacctcttaccaggtccctccttcaacgcgtggggattacaatttggattacaattcacgatgggatttgggtggggagacagaggcaaattatatcagtggtggtccactgaatgagaggagtgaatgagaagggattattaagggtatctcccaggcttcccagcaactgactgcaatcccctaaatagaggactctggtagggtaggtttgtcagtggggacatgagtagttccattttagaaatgctgagtttgaggagtagcagttctctctaacctgacagtgagatgtcaagggaacacaaggctgggaagggactctggccaagagtgggatttggcagaggggtgccaggacaagagttggctattctccattccaccctggagtctgcaaggccacagtgcttagggtgtgggctgacttagaggagcgaggacatagggattcctgctatggtttgagcgtgtgagttacagcaggtagtggccatatgtgttatacctggtgggaatgtaaactagaacaatcactatgaaaaacagtatggagattccttaaataactaaaagtagaactacgatttgatccagcagtcccactactgttatctacccagaggaaaagaagtcattttacaaaaaagatacttgcacacacatgtttgtagcagcacaattcgtaattgcaaaaatgtggaaccaacccaaatgcccatcaatcaaagagtggatggagaatctgtggtggccgggtgcagtgcctcacacctgtaatcgcagcactttgggaggtcaagacgggcagatcacgagatcaggagatggagatcatcctggccaacatggtgaaacactgtctctattaaaaatacaaaaaaaaaaaaaaatagctgggcatggtgacatgcgccttagacccagctactcgggaggctgaggaaggggaatctcttgaacctgggaggcrgaggttgcagtgagctgagatcgtgccactgcactccagcctggtgacagagcaagactccgtctcaaaaaaagaaaaaaaagaatctgtggtatatatatacaatggaatactactcggccataaaaaggaatgaattaatggcatttgcagcaacatgaatgagattggagactattattctaagtgaagtaactcaggaatggaaaaccaaagatcgtgtgttcttgctcataagtgggagctaagctatgaggatgcaaaggaataagagtaacacaatggacttcggtgactcaggggaaagggtgggaagggggtgagggaaaaaagactacaaatagggtgcagggtatagtgcttgggtgatgggtgcrtcaaaatctcacaaatcgccactaaagaacttactcatgtaaccaaacacccccgttccccaataacctatggaaataaaaaataaaacaaattgggaaagtaggattttaaaaaattgaagcctatcatctttttttcccctcccgaaataattttggggaaaattagtttttcaaaatgtttacaactttcacatctctgctccatactccaatttcaggccagtatgtgggtttctgaatttctcagctggagtgcagtagcargatcgcgactcactgcaacctccgcctcccaggttcaagcgattctcctgcctcagcctcctgagtagctgggaccacaggggcacaccaccacgcccggctagttttttgtatttttagtagagatgggatttcaccgtgttagccaggatggtctcgatctcctgacctcatgatccgcccacctcggcctcccgaagtgctaggattacaggcctgagccaccacatctggccacctgtttgcctctatgtcacctgccaggaagagatagtcaggccccygtagcccctccctagagctgcagatgatgagctgctcacctgtaagtttgtctctgcagtggcacctttttcttccagctttcactgttacacaacgtactcagcctcagtgcagaacgaagttttattggacatggaaaaaggggaaaaattaaacagattccccggcattagatagcagggccattttgctatctttattaaaatgtattgccatcctcttaaagaagagtaacaggctgatctatgtagaaagctataacatgcacatgcatgaacacacatgcacacacacacacacacacacacacaccacaccacacaccaaacagcccttcctcaagagaccttccaaacgatgtccaggaccgtgaagtcagttgtagactaaggtcctcctggctgggcgcggtggctcacgcctgtaatcccagcactttgggaggctgaggcaggtggatcacgaggtcaggagatggagactatcctggctaacatggtgaaaccccgtctctactgaaaaaaaaaaaatacaaaaaattagccgggcgtggtggcacgcgcctataatcccagctgctcgggaggctgaggcaggagaatcacttgaacctgggaggcagaagttgcagtgagccaaggttgcgccactgcactccagcctgggagacagagccagactgggtctcaaaacaaacaaacaaaaaagggcctccttcttagagtttcttaaattctgtaatgctaaattttatacagtctggaaattttcccccgagtggatgagaggtttagattattttgtctcactgtttttttcccttcaaaacaaactggaaaatgaagaattcagtcattacattttatgctaatttcttttattttaattcaacatttttgatggaaaacttgaaacatacacgaagatagcacagcataatgaatccaaatgtactgatcattcagctttaacaaatattaacattttgctgtttttttcagttactgctcattgactttttaaaaacaaatccccagacatcgtctcattccatctataaatactttacagtgcattgccaacatataaagactctttaaaaacatagtctcgacataaaattacacttaggaaaatccattacccagtccatgttttctcaaaaatatttctcaaaactcagttatattttctcaaaaaaatttgtttgatagtcagcttactcaartaagaatcccagcaaggtctacacactgcatttggctgatgtgtctctaaagtatctttcaatctgcaacatttcttctcacctttatttatttatttatttaatttatttattttgagacagagtctcgcgaagtgcagtggcgcgatctccactcactgcaagctctgcctctcgagttcacgccattctcctgcctcagcctccggagtagctgggactataggcgtccgccaccacgccaagctaattttttgtatttttagtagagacggggtcttctcacctttattaatttcatgtcattcatttgtcaaagaaaccaagtcatttgtcctatacaatttcacacaatctggatttagcagattgatgtttcttgatgtctttaacttgttcctttaatcttctttttatttttctaagctgtaattagatctacaaggttgattacttcttcctttattttttcctttctttctttttggcaagaacactttaagctctgctatgaacttcctagtgctgacattgggagatacataatgtctggttatctcactgtttctgatgttaggattcarcagcaggttcaggtgttgtcagcctgattgattcattataaagctccccatcaatctttcacttaattaatggttttagcagctaccaatgatcactgcctacacccattaattcattagggcctacggaatggtgatttttagactctacactcattctgcatttataagctgtaattcttccattaaaagtaacttttcctcctcaactatttgtgtattctgaaatacaattcaaaccrggaaagcaggataaatgcttgatttcttctttttatttaaacatcttcagaataatgagttggtgtcatagcaccctcttaagatgaccaatgaggttttcttttttttcctcaataatatggactcaagggtttttttttaaataaatattttatatgtctaaatccattgtcattattcattttttgcccactctatatttacttttattaaagcataatttaatacagtccaatgtacagattgccagtcttcagtctgatgaatttcacagtctgattaatatatacccctataatcacctctgaaaacctgacattggacatttctgttgcctgagaaagtccctttttcctatcagttctttcctcctccccaccccacacttcccgccccagcaagcatttcctgatttctttttttttttttttgagaaggagtcttgctctgtcacccaggctggagtgcagtggcacgatcttggctcattgcaacctctgcctcccaggttcaagcaattctgcttcagcctaccaagtagctgggactacaggcgcctgccaccacacctggctaatttttgtattttagtgtagacgaggtgtcaccacgttggccaggctagtcgygaactcctgacctcaactgatccaccctcctcagcctcccaaagtgctgggattacaggcatgagccaccgcacccagccctgatttttatcaccatagattagttgtgtctgttccagaatatcacataaatggaatcacatcttatagtctctattgtatctgacttctttcaactaaaggaatgtttgtgagattctccatgttgcagttgtgtgtatctatcagcaacacagtctttgtcgtttactgagaagtattcctctgtgtcaatatatgacaatttgtttattcattgtcctactgaggaataattgggttgtttccaatttgggactggtatgagcattcatataaaagtcttttatgaacatttgtttagatttcgcttgggtagatacctaggatttgaatagttggaatatctagaagatgtgtgttcaacttttaaagaaactgtcaatcaggtatccaaaatgtgccattttccactgttccacctcttttgcagtatttggtattgtcagaatctattttaccaaacctagtagggttttttttttttaattgcatggcacactgaaaggattcttttatttatttatttttattgacacataatagatgtacatattttgggggtacatgtgataatttaatatgttcatataatttgtaaagatcaagtcagtgtaattgagatatttatagtcataaatatttgacttttttctaaaaacattcattctcttctagctgttttgaaatatataaaaggtaatggtatacaatattcaccctactgacctatcaaacactaggtcttatttcttctatccaactgtatgtttgtatccattaatcaagctctcttcctcctttctcctctctaccttttttgttttttgttttttcttttttgaaacaaagtcaatctgtcacccaggctggagtgccatggtgtgatctcagctcactgcaacctctgcctcctgggttcaagcgattctcctgcctcagccttctgagtagctgagactataggcgcacaccaccacaccaggctaatttttctatttttagtagacatggggtttcaccatgttggccaggctggtctcgaacttttggcctcaagtgatccgcctgcctcagcctccaaaagtgctgaaataacaggtgtgagccaccgcacccagccacctctttaccctttgaaggggggtacttcagtatggttttaatttactcttccttgaaggaggatgagcacctttttttgagcttatagttaatttgtgtatctccttttgcccatttttaaacatcatgttttttcattttgttgttgatttccaggggtctgtggtatgtattctgggtactattactttttcagtgatatgtactacgtgaatatttttctactgtctgtggcttgtctgttcattttcttatgtattttcttctagaaagtttatatggttctatctttcacacttaggtctatgatcataaaggccctgctgaaaacataagagagtatcttgctgtgggtaatacttttttgtactgaaaacattaaaaaaacactaataaagaaaaaatgataaatttgacttaaaatgtaaatttcagctcatctaaacaaagtattaaaaaatgaatagccaagccacatgccgggaaaaatactcataatgcctgtaactgatgaaggaatcttatgcagattatgtgtaataaatcctaaaagtcaaaattaaaatattgcaaaaaggcttaagcagccactttgcagaacatccttgctttctggcacaagaagaagttcctgtcctgtcttgttatttactgtcctagacctggaattggccatttctctaaggaatcccaatcccttccaatgggaaatggtatttagagaccgaagtcttgtcagtgagggtgctcattgccactaggttgccattgtttctaagccttttccatgaacaaagctagacaacactgatttttgtttttttagaaagagtaaggtaaatcattatttcatactaatgtcttctgttcaaatttgtaattaccaggtatttacttcttatattttatatttacttttcactgaaagtcttggttcttattgacatcatttcttatttgacttatcctacaatatataaataatagtttcaaaataagaatactaacaagttgattgratgaggtttaatatttctttatggtttgttttgtccctaggatatattccattatagatgtacaaccaatgtctttaaaattatttgacataattttctctgtgtgattataccacctccttgatatagactattasagctatatggcattgaacaattaagttcacttttgttttttcttttctaccgaggctacaagtcagttaactaaactcagttgacctaaaattttagcattctttaggtattgctgtgtagtcacagccacatgcaccaaacactctgcttttaggttgattctacccagcactctcttgggccttcagttctacaatgtcggacaacccatactcccagagaagctgccaatctggacttctgcttaacatggatttgttttgtgtrgtaatttgtgccagtccaccatcactgtggctggtctcatgaatccagctggaagctcggtgattactattattgctacagcactggggaaaaatccaagaacttccagacataagaaaaaaaaaaatcctccaccctccctcccccaaattaccctattgattgtcaaagctaaactatatctttgcataccaaaactgagccagagaggacacatagcccacataagggtcaatacggggcccttaaaaagctaaacgtgggaagtgagtgtcaagaaacaccagcactgttattagtgtgtggaggtagcagagaacagaatggactgctcggagaaggaaagagaagccacaatgaggggaaaccatagactggtcttctttgtaattttcattgagaagcactttttgcaccacagttagtctgtattcagagtacttagcttactaaggcaagctggcaggtaccagttttgagaatgagttcacacaaatgttattacgttaaatgggacaaaggagaacttaaaagtaatacctagccaggcacagtggctcacacctgtaatctcagtgctttgagaggctaagacaggagaatcacttgagcccaggagttcaagaccagcctgggcaaaatagggagacccgtctctacaaaaaataattacccaggcatggtggtgtgcccttgtagtcacagctactcatgaggctgaggcaggaggatggcctgagcccatgagtttgaagctgcagtgagctataatcataacactacactccagcttgggtgacaaactgacaccttgtctctgaaaaaaaaaaaagaaaaaagtaatacctactgtggattgccactaacagtactccagacactgtagtaaacgctttataaacattacattattcagtgctcgtgagatttctgtgcgtttttcattattgaacctattttacagatgataatactgggattgacacaagtcaacttgtccaaggtcttacagctaataaatagaacagccggaactcaacccaaatctacataatttgagttctatgaggcttgcgacctcttgcttggaatttattcatccatataactttattcttccaccatctggataactgtgacaatattgcagatacacggtgacgcagtcatatggtaggtgctatggatgatgcttgtatataatgcatatcataaaacaattccatctgcaatagattatgttcataatctttatgtagacacacagataggaaccatgcccgtacatgtatttcatgtactacactatctcatatatagagaactgtagttatgtaataaacaaaaatgtgtttgaaacagcatgaaattgratttcctcatccataaattgtattatatttatgtcgaagttatagttcaagaaatagaactgcaatgttgatatttttataaatgatgtctaatgtatttctattaaggggagatagatttgctctgctgaaatgtattatcataatagccaaaccatttactctaccactggaaaatagtgtggtattctgtttggaatttcacttgcctgctcccagcctgccagatctattgtaaattattgtaggcatctgtgagttattttataggaagcatccatctatttttataactccaaaaagcctgtcactctcattcatctccttgggaataaagcaataatttgattctctataaatgtgaacctgaatttacaccatcctctccagttgggactttagtgatgtgggtgatttatggctctgggtttctggggcaaggccctaggagatgacatcctgatgtgcttgttgtcattttctactatttccacagaaaaagggaggggactcaacctgcccctattctatttagggcacaactatttgttccctgtccatgtagccatgttgaatagcactttctttttgttgttgttgtttgtttgtttgttttttgagatggagtttcactcttgttgcccaggctggagtgtagtggctcgatctcggctcactggaacctccgcctcctgagttcaagcgattctccagcctcagcctcccaagtagctggaattacaggtgcctgccaccaagcacaagtgggattacaggtgcccgccaccaagcacagctaattttttgtatttttagtacagacagggtttcgccatattggccaggctggtctcgaactcttgacctcaggtgatccacccacctaggcctcccaaagtactgggattacaggcatgagccaccgcgcctggccatttgtttggttttgagacggagtctcgctctgtctcccatgctggaatgcagcggcttcatctcggctcactgcaacctccacctcatgggttcaagcgattctcctgcctcaggcttctgagtagctgggattacaggcatgtgctatcatgccgactaatttttgtattttgagtagagacagggtttcaccatgttggccaggctggtcttgaactcttgacctcaggtgatctgcccacctcagcctcccagagtgctgggattacaggcgtgagccaccaccacgcctggctctaggcctgttgaatatcaaatcacaagraacagctgtaagggtcccgaattgctccctgcagccctggatccagcagttgggtagatgtctgtgaaagagccatagggactgtgatgtgctcagccttccaggacctccactgcaatttcttacattttcagmgcttccacaggaaattagtcgcatgtctgggaaactcctcaggtatttgcaaccaagttatctatctatggtttcccatcttttggctcattggaaatgggctcatctgagaaatgtcactgttgattgtttgtttgtttgttcgtttgtttgtttttgagacagagtcttgctctgttacccaggctggagtgcagtggcgtgatctcggctcactgcagcctctgcctcccagattccagcgattctcctgcctcagcctcctgggtagctgggattacaggcgcatgccaccacgcccrgctaatttttgtatttttagtaaagacggggtttcaccatgttgcccaggctggtctcgaagtcctgacctcaggtgatccgcctgcctcggcctctcaaagtgctgagattacargcatgagccacagcaccctgccgaaatgtcattgttttatttcctcttctcttgcaaagatgccaagggcgcagatggagctgtccgtctgtcagttgcctgtggtgctgtgggaccaatgctttttgtgcctggaactgtggatgcttccagggccagggaactgggcagtgggaagagtctgaattatcacttgaaggaggagatgccatgagcaggaaggaatcaaggctggagtgtgtaaaccaaagcactggagagccaggaagaccagaggaraaatgatggaccaggccaagcgatgcagagactgggtccagaggagccacttgagacaggtcgggtctttctggcgcccacactgtctttcctatgcattttgcagcatgacgcttaggtgggctggctgccagctgtagtggcaagtgcctgtaatcccagctatgcgggaggctgaggcaggagaatcacttgaacttgggaggcagaggttgcagtgagctgagatcgtgccactgcactccggcctgggtgacaagagcgaaactccatttcaaaaataaaataaaataaaataaaataaaataaaataaaataaaataaaataaaataaaatagcatagcatagcatagcatagcatactaaaataaaataaaataaaataaaataaaataaaataaaataaaataaaataaataaagcatgcagagtgaggcaacccattcctcagcttcaggacccacagaggaacctggattcatgcataaaacgcctctgacatctctttatgattttctcagtctggatggtttctgctgggggctccccctgattggaaacatttgtccttgaacatcatttttgaagtattatataccagcctagctcagcaagaaaaktactcatgccagtgaccatcattattgtggaagctcttacttaaatcagttagggctgagcatagtggcacattgcctgtaatcccagtgctttgggagggagaggtgggagaattgcttgagcccaggagttcgagaccagcctgggcaacatagtgaaactcttgtctctacaaaagctttacaaaattagctgggtgtagtggtgcacacctgtagtcccagcaactcaggaggctgaagtgggaggattgcttgagcctcaggtggttgaggctgcagggagctatgattgcacccttgcactgcagtctaggcaacagaccaggaccttgttgcaataataataataatamatttttaaaaacaattagttttgggacaagaaggctaaatggaaatttcatggatagatttaccaatatttttcttccttttttttttttttttttttttgagacaggagtctcactctgttgccaggctggagtgcagtggcatgatctcggctcattacatcctccrcctcctgggttaaagctattctcctgcctcagcctctcgaatagctgggattacaggtgcgtgccacgacacccagctaatttttgtatttttggtagagacagggtttcaccatgttggctaggatggtcgctgtctcttgaccacgtgatctgcccatcttggcctcccaaagtgctgggattacaggcgtgagccaccacgcctggccccttgacarttttgactctcacccttgaagctactgtctgtagatatgcagaatgtcatggatgggaacttcttcaatggagacccatatgcaaccagtgtctgccttacaggaaacaaagtggtacccgtttcactattttctcatgaattcccttcccttttgaaaatctaaaaggagaatgaggagaatgcattgtgcgttggacaactccacaaattttaaagcattcaagtttagaaatacagctttgtgctttctccatgtgacagaaatggaaagaactaaaactacatatttttctaagcttgcttttagacttttctttttctaaactttctgggggcgcgttcagattccagctctcctacaagaacaaccacgcagggaaattacaaatgtccattctccagatgtaagaggccaaaggaatgtgcagatttcagtgaaaagctatcattttttttttaatgttttggctcttgttgacacacatcaagttctcctttttttgctcacccagaaaatcagccatctctttgggcttaaatggtgatgggaaatttggggctctttttggaacgttatcaaaggaaaattatgcgggagacacagggaccagctggggtggatggtctgagtctgagaacacctgggcaggtttggggtttgctctatgtgactggagggagctctaaaggtactcaaagtacctaaagaaccaggattatttatttatttttttaagacagagtctcgctctgtcacccaggctggagtgcagtggcacaatctcggctcactgcaacctccgcctcccgggttcaagtgattctcctgcctcagcctcctgagtagctgggaccgcaggtgtgcaccaccacacctggctaatgtttgtatttttagtagagatggggttttgccctgttgcccaggctggtctggaactcctgagctcaagtgatccgcccacctcagtctcccgaagtgttcatattatagggattagccactgtgcccagccagaaccaggatatcatgagaaactctagcaaagctgttaagataggaagagatctatgctcaggcagaaggggaggaggcaggcaggaattcttgtgaaccagacaagtaacacatgagatgagcttgaggaggttggtcgatattccagttctagctatgtagcaaatagcccaatagtaaatggtttaaaataactgtaatcattttattatctctcctgtgcaccaggaattcagataggaaatagtgtattatgggttgcattgtgtcctgcaaaaggcatgttgaagtccttacccctggtgcttgtggacatgaccttattgggacatagagactctgcagatgtaatctaggtaacatgaagtcattagggctggccctaatccagtgtgattcatgttgtgataaagagaggggaagacacagatacacaaggagaactctatgtgataacagagtcagaaattaggatgatgtagctccaagccaaggagccccaaagactgatggccaccaccaaaagctagaaaggagatgaggaagagggttggatgcagtggcccatgcctgtgatgctagcactttaggaagccgggacctgagaatcgctagaggttaggaaatcaagaccagcctggacgacaaggcaagaccctgtccatacaaaaaataawaataataacagtttaactgggcatggtgtcacatgtctgtagtcatagctactaaggaggttgaggtggaaggatcacttgaagccaggaatttgaggctacagtgacctatgatggtgtcactgcattccagtctgggtaagacagagggagactctgtctcaaaaaaaaaaaaagatgcaaaggaaagtaaaaaaatccaggatgaattgatagtcatgataccctggaagatttaaacagctgggctggaacagtgagagtttcttgggcatttctttctgtgtatctacagttcctctcctggtcttcccagcatgatggctttgaagacgccatccttcatatgtgttggctcaagactcctaagatgcatggagagagagactgagacacacacacacacacacacacacacacacacacacacaccatattgcctgttatgatctaaccagaaggtcaggcagcaacactgccatcacattccattggccaagacaactacagatattctcccagttccaatgaccccatctttcagtggaggatggtcaacatgacacgcaggaagattgtgggggatgagatttatactaatgtagttgtctttggaaaagacaatttgttgcaggaatcaatgggagatgaggatcccataaagggcaagagagtagatgttggcaaacgtgagattaatctgctttgttttttatattctttgcgggtattgaaaatgggattgatttcttgatttgttttttgttgttgttgtttcttgtttgagatggagtcacacattgtcacccaagctggagtgcagtggcacaatctcagctcactgcaacctccgcctcctgggttcaagcaattctcctgcctcagcctcccaagtagctgggattacaggtgcccaccaccactcccagctaattttttgcatttttagtagagacggggtttcaccatgttggccaggctggtctcaaactcctgacctcatgattcgcccaccttggcctcccaaagtgctgggattacaggcgtgagccactgcacctggcctgctgctttgttttttaattcaacagctcatgcatgttgaaagcccagtgggaaagatccatttgagagggaaaggttgaataaacaagagagttaaaggattatcgataaacagtgcaaagtacctgcaaagacagaggatggaatctgagtacaggtgtaggaactgccttaggagaagtcagggcttctctagtgaaatgggagggaagaaggggagtgtggagatgtttcttcagtttgagtttgcaaccctgaagatgagcaggtttgtgggagatggctcctgcttcctctgtgcaatggaagatgtggtcatgtgctgcaagaaaaaggcagaagcaaggtcagaggtttaggagagttggctaaactgtgaaacactcactgtgactattggaattgccttaatcacaggcacagagtcggggaccacttgtgggtggtgatcagggcccatcttccctgcaataagggaccctagcaacactcaggacatgagtttgggctggaggagacccactcagggttgaggctttgccatctgtgtacaacaaaatgacagaggggccaggcacagtggttcacacctctaattccagtgctgtgggaggcccatgcaggagaatcacttgcagctaggagtttgagaccagcctgggcaacatagtgagatcccatctctacaaaaaaagggtttcgtttgtttgtttgttttgaggtggagtcttgctctgttgcccaggctggagtgcagtggtgcgatctcagctcactgcaagctccacctcccgggctcacaccattcccctgcctcagcctcccaagtagctgggactacaggcacccgccaccatgcccggctaattttttttgtatttttggtagaaacagggtttcaccatgttagccaggatggtctcgatctcctaaccttgtgatccacctgcctcagcctaccaaagtgccgggattacaggcgtgagccaccgtgcccggcctacaaaaaagttttaaatgattagctgagtgcagtggtgcatgcctgtagttccagctacttgggaggctgaggcaggaggatcacttgagcccagaagttggaggctgcagggagctatgattgtgctactgcactccagcctgggtgatggagtgaatccccaaccttaaaagagtaataaataaataaataaataaataagtaaataataaayaaacatttctgaatttcacatgcaagaaagtgagctgaatgtggtgtcagagaggaaaggcagacaggaagggcagctggcctagaggcgttacagtgatggagggttgtcagcagatgagccatggtgatttgtgccccatgtcacacaaatgcagtgttggagaaccaggaggccaaagagctttcctggcagaggttgtgggactggccccatctctgggttccctggcagccggtgcttcgtgattaccttgcttgtcaatgtgggacctgtgtagtgtcgtctgccccaagttcttctcagtgcccctcaaagtcctcatcctactgatcttggcattcactttttctcatgatcccctgctccctgctgtaataacacggtactttcatttcctttttttttttttgagacggagtctcactctgtcacctaggctggagtgcagtggcgcagtctcggctcactgcaacctccacctcccaggttcaaataattctctgcctcagccttccgagtagctgggactacaggcgcacgccaccatgcccggctaatttttgtatttttagtagagatggggtttcaccattatgcccaggctggtctcgaactcctgaccttgtgctctgcctgccttggcctcccaaagttctgggattacaggcatgagccaccgtgcccggccggtagtttcattgcttattatgatagtagaagtcattttctaattcagaacacaggaacaaaactcatattctagaagagatgtgtcactctgataatcctggttgactccctcaaaagcagcggagtgtgtcattaacatgctgcagttgacaatgggtcatcagagatataggcaatgcacccatataggcatggatctcacatatgtgaagatgaaatagctgtgtttagtatttctcttacctggatttagtggtagttttttgtttccagtgtattttggggctttgtttggatgtctttttattcttttttaatttagtagatttcagatagaaagacctaggagatccatccataggaatgagatgtctcaacaaactatctagaaatattctaacatggacttgagatgaaaagaatctatggaaatgcctagacttcaatcggcatgcaaacatttattgagcgtctactaggtgctggcactctgccaggcctggggtaatcagaggtctctgagttgtggagacattaagtgactaagcacacagaaatgggcagtagcaaatcgggtaaatgatcagaaggaaaagtactgagtgctatgagaaagaacgggggggattgcgtggtgggtggtgggggtggtgtcggtggtcttagttgacctgtctagggaattgcatggaagcatggcttgaaagtggaagaagatagccaggcacagtccaggcagagagcaggactcataggggcctcaaggtctggaaagaaatgggtttgttgagttccaggacctggggaaggcctgtagctgagcagaacagtgcaggctgagagtggtgaggttggaaargcaggaagaagctcaatcttacagagcctcatgggacaccatgagtcttgggaactttatctcaactttaatgagaaatcattgaagggagaaccacatgatcccacatgggttcagaacagacttggttagggacagagcctaagaggagactgacttggtccaattgcattgggaagccctgtatttaagggctttgctttcttttatttaaaggtttgttgccaccctctgacagtgaacctctaagggtctctggaggatgactgcttgggcaaagacagccagaattgaggtctgagcagggcctgtgagcctcacttgctgtgaaagtgtggtcttrgctagtgtctccagcagccccaagtttgagtcttgttccaccccgcatcattctgtgtcctcttaaaaaatatccttccctctactggagcagctctgaataccagtcagggaccagctgaattttaagcctaggctgtttcttctgcctgagttgaggaccctagagggcacttgggggtcacccatcagagcagaatttctcacctagacattgatatctggtgggtagaggccagggatgcttctaaacatcctacaacacacaggataccccccccaccccaccttaagaaattacctagcccaaaatgttgacaaacatgcaataataattgcactattgcaattgtgcagtcataattgcactgttgacaaatatgcgataataattgcactattgcaattgacattttgggctaggtaatgtcttattgtggggtagagggtatcctgtgtgttgtaggatgtttagcagcatttctggcctctacccaccagataacagccatgcctcaccccccagccaagttttaacaaccaaaatatcttcagacatggacaaatatcccccaggagagaggacaaagtcatccttgcttgggaaccatggatttagaacatgacttcccaagagggtaatacgccccccacctcaaggagatagaacattagttttggggggcccaaaatcttagatgttatagtggtttgtagttgaccaaaggagccacagtgtataagcagatgtacagcagatccatggtattgaaatttcatgggaaggaaggcaattagggaaggaaaaaaaaaaaaagtctaaaggctcctgggcaggaatagggggatgataataaaaaaaaaataagaaagattgatttagaccaagagagagccagtttttcctggaggataggaaactggatattgaactggggaaccagagggtacattggggaggatcaggcaggggattagcaaggcacggaaaaccagagactcatggtcataatgacacctaactgtaatcaytccccacgtgcccggtaccgtgcccagtggtctgagtgctcacagcaacaccatgatgcagctgctcttatttatctccaactttatagataggaaacagacagacacagattaagcaatcagcagagccgtaatcagatgtccaagtccagagccagtgccctttgccatgatgggtcaggactgacctgtgtccctggaggaatgggacctaaaggagctgattagaggggtttgtaccttggagagtaattttggttttttgtttgtttgtttgttttttcactctttttttttatttttccataagttattggggtacaggtggtgtttggttacatgagtaagttctttagtggtgatttgtgagatcatggtgcacccatcacccaagcagtatacactgcaccatatttgttgtctttatccctctccccactcccackcttccccccaagtccccaaagtccattgtatcattctatgcctttgcatcctcagagcttagctcccacgtatcagtgagaacatacaatgtttggttttccgttcgtgagttacttaagttagaataattgtctccaatctcatccagctcactgcaaatgctgttaatttattcctttttatggctgcgtagtattccatcatatatatatcatatatatatgatatatatatctaccacagtttctttatccactcgttgattgatgagcatttgattggttccatgattttgcaattataaattgtgctgccgtaaacatgcatgtgcaggtatcttttttgaataatgacttcttttctttgggtagataacagtagtgggactgctggatcaaatggtagttctacttttagttccttaaggaatctccacactgtattccacagtggctgtactagtttacattccttggggagtgatttggtataatggattagtagagagcaggggagataggacggagacagagctgggaagagagcaaagggaacacaggaaaggggagggggtgagttggtagaaaactggccaccatacctgtaatccaagcacttgggaagctgaggtggaaagatcatttgaggacaggagcttgagaccagcctgggcaacacaggaagaccctgtttctaaaaaatatgtatatataattagccaggcgtggtagtgctcgcctgtggtcccagctacttgggagactggagcaggaggatcagttgagcccaggagttcaaggctgtaacaagctaagatcacaccactgcactccagcgtgggcatcagagcaagaccctgtctttgggaaaaaaataaaataaaataagaaaactgaaaattgggaaattacccaagagggaagaaggaggcagggggttgagagtccaagaagcatggaatcaatcaacctcagaatttcagtgaaatcatgatatgactttctcctggtgcctttgtgcggatcttccctctcctctggctgcacagtgagatgggaacagactgggctgagcagctgcagatggagtctttccagctgacccgtgcaagactggcctttgccatggcctttcacacttgctaagtgaatcaatatgctcccgacttcccccggggcctgtcttaactgacttctttcttgtcctaaacttatgatcttttcaggaaggaattttacgaccatccctaattttaaaaaatcaaaatgcgtagagtatttctcacccaaacttttcatctacaaagagaaatgatgctattttatgccatcttttgacaaatattgctctcttctcagaccccaaatgttggctctttttatctttagtctgtgctgaggaagggctttagattccagtcctgttgctgcagaggcagctcccagctcccagcacacaccccaaaacagattgaccctccttaactctcctttggtaacctaggaagccaakaaaagctgtatctttgatgtctcggctttgaaaaagaattgctgtaatgtggcgtaattggagcatttcaaattaggaatggaattatgataattgactctacgtgttactgtctctaagattgttcttgcacacagattcggttttgcttctgcaccctctctctctctccctctgcagcttctgggggatacacagggcctgtagccatgtggcaggggaggtgacaggccagatcattttcaggctcccagattaattgtagattgtcagagggccccaaaagttcatgtagtgtaaacagtgaaatatctgtgtgagttgtcaggtgacctgggcttaaactcctccagtgacaagacactcaactccttcactacttctgccactggactgatgggaacactggaaatagtggatacacctggtactatgccaagtgcatatactgggtactgtgccgagtccacacactaaatgttatgctaagtgcatataccaggtaccatgctwagtgcatacactggatactatgctaagtgtatataccaggtcctatgctaagtgcatacactggatactgtgctaagtgcatataccagttactatgctaagtgcatacactggatactatgctaagtgcatacaccaggtactatgctaagtgcatataccagatactatgctaagtgcatataccagatactatgctaaatgcatataccaggtactatgttaagtgtatacactggatattatgctaagtgcatatactagatactatgttaagtgcatacactggatactgtgctaagtgcatataccagttactatgctaagtgcatacactggatactatgctaagtgcatacaccaggtactatgctagtgcatataccaggtactatgttaagtgcatacactggatactatgctaagtgcatacactagatactatgttaagtgcgtactctggatactatgctaagtgcatataccagatactatgcgaagtgcatataccaggtactatgttaagtgcgtacactggatgccatgctgagtgcatacactaagtactatgctgagtgcatatgctggataccatgctaagtgcatacagcaggtactgtgctacgtgcatatgctggataccatgctaagtgcatacaccaggtactatgctaagtgcatacactggatactgctaagtgcatgcactaagtactatgctaagtgcatacactaactactatgctaagtgcatatgctggataccatgctaagtgcatacactggatactatgctaagtacatacaccaggtactatgctaagtgcctacagtggatactatgctaagtgcatatgccaggtactatgctaagtgcatacactggatactatgctaagtgcatacaccaggcactgtgctaagtgcatacaccaggtactgtgctaagtgcatacagtggatactatgctaagtgcaywtaccaggymctatgctaagtgcmtacagtgratacyatgctaagtgcatataccaggtcctatgctaagtgcatacagtggatacyatgctaagtgcayataccaggtmctatgctaagtgcctacagtggatactatgctaagtgcatataccaggtcctatgctaagtgcatacagtggataccatgctaagtgcatataccaggtactatgctaagtgcatacaatggatactatgctaagcgcatataccagatactatgcttagtgcatatgccaggtactatgttaagtgcatacaatggatactatgctaagtgcgtatacgaggtactatgctaaatgcatacaccaggtactatgctgagtgcatacactggatactatgataagtgcattcaccagattttatgctgagtgcatacagtagatactatgctaaatgcatacaccaggtagtgtgctaagtgcgtacaccagtactatgctaagtgcatgcactaggtgctgtgcataaaccaggtactatgttaagtgctcattgccttatttcattcttagaactgaccaatgaactattattcttattcttattagcatttcacaggcaaggaagctgagtcatggtgcttgcaacaggaggagccagatttgaactcaagcagtgtgacccagcaggttcaattaactaccatgcgatactaccctataatttatctcactcaagctttaatacaatgcttccctgtggctcttatacagggcattggttctgttcgctggagctttatagcacaagcccaagtcctcttctgtacaacatccttcagataactgaccacagttgcatgtctcctcctccttcagagtcttctacagggtaaatgtaccaagttcctcactggtcctctaatctaatgcttcaagtctcctgctgttgaggttcttctcctgtcttgctcagaaaagaacacacccatcatatgtggcaaagagcagagtgcccccattctaggacaagggtgtgtcctatccatttttctggaagctacacttaaagcctgaaatcgtatcacattgtggacagagtgaatcactgcacctgttttcccacaaacaaataaatgctttggggctgtcccttcagaaactaccagtgaaactacattgagaacacttaattcaaggatatcttgaaagctggacacattcttcaccctcaaacttggctcgctcttgaatactatgcagttaaggaaaattacaccggatgccagccttccgtttatttattcttttgctcatgtattcaatatttacacagcaaaggagtgcctactaggtttccgacagaggactgggttccaggcatagaactggccaaccacgatggctcacacccataatctcagcactttgggaggccgaggcaggcggatcacaaggtcaagagatcgagaccatcctggccaacatggtgaaagccaatctctactaaaaatacaaaaattagctgggcgtggtggcgtgcgcttgtagtcccagctactcaggaggctgaggcaggagaatcacttgaacccaggaggcggaggttgcagtgagacaagatagcaccactgcactccagcctggcgacagagtgagactccatctcaaaaaaaaaaaaaaagaaaggtgaagaacttatcagttttgttctcaaaggagaaaacaaacaactcaatagttacaataaggtgtcattagcaaaataaaactgatgtgcccaggataatctggggttagagaagaggactccagggtgcagaatgaattttgactctgatggtgtttcaagagagagaatacataggaaacagaaattcatttagcctaaggaaggcttgatctagccctaacccgaatctacatcatagctaatagcacagtgaatgaggcttacccatttgattgattgattgactgagacaggatcacccactgtagcacagtgaatgaggcttacccatttggttgattgattgactgagacaggatcacccactgtcacccaggctggagtgcagtgctgtgatctcagttcactgcaacctctgcctccttggctcaagggatcctcccaccttagcctyacaattagctgggactactggtgtgtaccaccacactcagctaatttttgtattttttttttttttttgtacagacagggtttcattatgctgcccaggctggtctcaaactcctgggctcwagcagtctgcctgccttagtctcctgaagtgttgggattacaggcgtgagccactgcgcccaaccacttacccatttaaatgcttatggactgtgactattttgaaaagagtgcaacactctttcgaaagttactcaccccattccgaatctgtcacctttggtggtcagcatgcttagatgaacagcgcttcacacaaggagtgtaaaggaggctctataactcttggagtgacacctttttgtgaaactgtcctttctcctatcatcttccatctgagtgagttcctgtttttactgacctgtaatagcatctgctcttctcttgtggcagcaacagcacacttccatcttcacatatgtcaaggttcttgcacgtggtacccagtagtctgattagactgtcttatctcttcgtgggccagatacccaccttcatcatcctctgttctcctagtatataaacaggcctgtgatgagtgaatatttcttaggaggtccttggtttcgttgggtttacttctgtcagcattagccatcatcaagtcttgttcctgcccacatatgtgctggcaggtattcacatacacatgtgggaatcccatcttgattttttctgctcataattctggatcacagttctctacaactggatgagatacactgatatattcaagaagccatatgcggtatgaatgcagtgtacagtaaatctgaaagacaagggtagtgggggtggaaagtaaagctacacagtaatttggtggtcagaaacaaatggcccatgcccacaagatcaccttcttggatagatgccttgttaaaatactaattgatgccaggagtgttggctcacacctgtaatcccagcactttgggaggctggggtgggaggattgcttgaggccaggagttcaaggctgcagtgagccatggtcatatcgctgcactccagcctaggtgacagagtgagaccctacctaagagaaaaaaaggaaaatacaaattgatacccaagatagcgatatggtgagaagcccactaaaaatacttctaatactgcctgagaaactaaaggagttcatcatcagttcactaaagaattttgtttgaattcttgacttcagtaaattgatgatgaaagaatatgaataaacttaaaaaatctaaagcctgtgagaacattttgtaacacaaaacaataaagtcgtaagartttaaaggtggatctaattatttcttacttgaaacacatagaaaagttggaagacaatttttacaaattctcaataagatagaggagggctttatacctattaatcataaacagggtggcaggtaataagcaagtggaataaaactgttagaaaacatgacacgtactatttgtttgttgttaatttccactgaagagcaaattaacactgaaagatataaagagataaactcaagaaatactgctgaaggaaaatgagaaaagatgacctgccagggttgtaagacataaagatataatctatgaaaaacataatttcccaaagaaaaggagaaaaaaaaccccacagattaaaagaggaaaacaatctatcccttgattttcacttttctcttggtactttctcaatagagtaaaccaaatgtgaaccagacttccttcttccttcttgatggttaacttccttgggatgcacactgaactaagttaagataggataagctatgctacagtaacaacttagtcctgaactttcagttgcctcacacacaaaacttatgtctcatacctgtaaaatccagtgagagttgaatgactctctagagcagtttccttccaggtggtgactcagggatccaatctgcatcccacttacatgacatagggagcccatattctgttttccccaggaaagttctgaattattcctgttgagctgacataatgatcactaatacctctttttactctcagaaacktgcatgtgagtacataaatcatatagtcatctgagagtttcaccccctgaatctggctttcaggtcactgcagcaggaaagaaagaatggagactcatgggccagttttgttctgaaatgctttgatcctggagtgatggatactgtttcccacttgccactcatgcagttgctggctccatccatctaccaggggttgggggagggggaagggacaggacttgggttgggatggaggtgtcacgtggacagtcagtgagcagtaaatgtcaggatcacaataaccttagtaaaaaccaaaataaaatgaaaagtgttacacaaatacaagtagtatcaacataatgaaattctcaagtaccatcatataattttgagctctgctattgtaacagcaaagggagacctgaattgtgcttggtttcctccactgtctggccaggttcatagcaaacaccatctcattttttatcccagcatttgaggagtagtcaggtaccagtggagagctgaaagtggaggactggggtcatagaagaccctttgtgagtagtgagggcttgaagaagagaccgaaaaaccagcaactggagatgaactgggaatcctttattattaataattattattattagaaatggggtcttgctctgtcacctaggctggagtgcactggtgcaatcatagctcactgcagccatgagctcctaggctcaagtgttcctcccacctcagcctcccaagtagctggggactataggtgcttaccaccactcccagctaatttttttttttttttgtagcgatggggtcctgttttgttgcccagactcatctcaaactcctgggctcaagtgatcctcccattacagcctcccaaagtactgggattccaggtgtgagccattgcacccagccatcttttactcttcctgatcaaagccattctagcatgctctgcctgtctaagtcttctcactcaggatccacatcacagccttgatgtctataccaaaggatgtgccttttatctatttccccggcattggttcgtttattctgaatcttttgtctggacttgtctgtgtggattatggattcagaatgagtgagcatttgagagggagtcgggtaccatagacctgaaagatgaggactgaggtcaccaacgttcctttttgtaagccgtgaaggcttgaagaagaggccaaagaaccagccactgtggaggtgaagaaagaaagcaagttcaatgcatcaggcgaatgggagttgcaacaagaaagtagacattgttgttccaccattcttaactcacagcaaactgagaaaacagagagagagaaagagagaaataatttttttcatttttattatttaaaatttgtttatgggtacatagtaggtgtatatatttatggggtacatgagatgctttgatacgggcatgcaatgcataaaaatcacattatggagaataggatatccaccccctygagcatttatcctttgaattacagacaatccaattacattcttcaagttattttaatgtatactatatgtatatagtgtgactatatactatgtacataatatgagtatatggtgtcaccatatagtcaataataacttaattattactaagttattattaataactatctaattgtgctattagtaggttttattcattcttaagagaaagaatttatatagctgatgtgaaaagtataattaggctcaatcgataaatatttattcatcaattatatgatgagtgaatgaacacatataattaatagacattttttagaactttaatacctcccaaaaagagaatgtaatgtctttttaactgtgtccatgaatcagtcacaaaaattgatctactaagctgcaaaattttcatagaccttaaaaagtagaaaatttacagaccttattctccgatcacaatataataaaatcaaaaattgataatatagaattaaataaaaagacccctgatggaaagatatcctagccattaaaatggtcctaaatgactaggtgtggtgactcacacctgtaatcccagaactttggtaagtcaaggtaggaggaccgcttgaggtcaggagtttgagaccaacctgggcaacgtagcaagactcyatctctttaaaaaataactgggcatggttgtgcacatctgtagtctcaggactagctactcaggaggctgaggtggcaggatcacttgaacccaaggctgcaatgagctaggatcatactactgcactccagcctgggtgacagagtgagaccctgtctctcactaaaagaaaataaaaaattttccctaaatacagcattctggggcaaaggagaaaaccaaaaatatcctaacaggctgctaaaaaattattgccagtgacaacaatatttatcagaatccaaggaatgttgccaaaataatgtccaaagggaaatacacagcttttaatgtggtcattattattacatgagattctggagaaatcaggaatattcaatctccatcaaaaaggcatgatgcggtggctcatgcctgcactttgggaggctgaggtgagcggatcacctgaggtcaggagttcaagaccagcatggccaacatggtgaaaccccttctctactaaaaatataaaaataagccaggcatggtggcatgtacctgtaatcccaggtactcaggaggctgaggcaggagaatcccttgaatttggaaggcggaggttgcagtgagccgagatcacgccactgcactccagcctgagcggtgacagagcgagactccatttcaaaaaaaaaaaaaaaaagtccactggccacataacctctgagcttttgtctgatcttttgtctccactgtcttctttatgcttcacatcccattcatccacaggtttcccctgggctccttcagattatctcgcagcaaaacctactctctactccagtgccttctttccccgagaccattattcctccccaccatgggatcttccagctgtctcttcttgctaaggcagatagagtcctgttgttccctcatgagaaacattggttatatccctctactgtctgattgaaatctgtcctctggggtgggcactcaaggcccattccacgtggaccccatccaactcactggattttaagatccagcccagtgttagctgacttttagttaccagtcatcattccctccatcctgggactcttcctctgcttatatttgatttgaccctgtgatatcacagagaaacaaatatcagttgctttgtcttcttcccaatagcttatacgcttctgtgccctgacccacttcctttaggaatctctctgctcctcctcttcctcactgtgcccctgcagaaggtctggagcacacaaatccaagataaatgtttccttgatgacaaagaactcttgtcacggtctagagcagtcatacatccaaaaaaaayacgcacttgcatggtggcatgcacacattaaactcctaggaaaatggagaaattatgtattatctagtgccatgaaaatgctaaaggaatttggacaaagcggaagaccatggtgtagaataacctcggatgccctgatgttgcaaaatggaaagcattgtgtcagtaaagggatggatggargaaaatgacctcaagcagagagagaaagtgagtattgggagtgtgtggtacagcttaggggccgccttatctggagaggaaaatctccaatgagaagcacaggagatgagcttggatgatccacacacttaccacccagccacaatttgggtgcaagttggtgccatctcttggttgaagcaatcggcatcattcaggccaaaatagatgtctttgttctttttgttcttggaaaccctgctcagtttgtattgacaatgtacattaaattcaaatggaatgttcccccagtgcagaagattttttcaaacttagactatgagagcaaaggaatttgaggtcacacttgagttagtgtgagtaggagaaacaggacattgacccgaatgctttggattttttgtttgcatttggattctatgcctttggattttcatcccacattgcactgtggctaactctagcacaaccacataccccatctgaagaattgggcatatggaaatagacctttagacactaaatatttgtcattttatattgtgcataattactctgcctgcattgcaacgtggaccaccagcatccagctccacgctcttcgtgcattgggtcgaaattagttaaaggaatgcgtaaagaagaggttgtgttcagcaagccatggtgctaatattctgattaagtgtgagctttttggcacacagcgtasatgagatgtgctgttgtattaataggctgtaaattataaataattgcttgataggatgagaacctgaagcgatgggtttctttacagaatgctgattattccctcagtaacaaaagacaagggaaccgattcctgcaattgtttccctttggaaaggaaaggacattttggtctgtcatgttgatggaaaacactagaaatttcctttgtgattattttgttccctttcatccaagctcctagtttattckcacacatgcagacataaactgggcagggtgaaaattccctgcatgaaccattcggttttcggtttgccagtccccatcaatgacaagtatttctttatctggtcagaaaatggaaattctgttttctgagccagccaagataccaggtacaaacagagcttccccctggggattcacagcctgaaggtggttaacggcccccctctcgcctatcaccagactccagtagacgtttctgatgcggggaggctagttctgaatccaagccaacactggttgttggttccaattaaaaagcaattgcattcccagcagttcagggctgcagccaaaaatacagcatgttcagaaaagcatgatcttttttgagaggcggttactccatcaagggatagatgctgccagggagagctaatgatggtacattcgtatgtgataaaaatttaaaagttcaaagaagaaagcaaaaggtagatgatttactttgaagttatttgtagatggcaatgaggattttctgttggtctctttttcccccagcattaatcagcccatttattagaagacaaacaggaattgaccgtttgtcagacagcaaagaaacagagcaatcacattaaggaaatcaaaggcgagaatgtcaaaaggtcagcattaagcagccctgggaagcagtgtcactctgcagacgtttcagccaaatccttctttccatgagtagcctctgctttttgggaggaccaatgagcatagagagcttggagggactttccagttcattgcattctgtctcctctgctggtcagaggcttatgtctgggtatttttagcaacctccctctgtctttgttggctccagaacacataatttcagaaaaatcaggtataaaatctcaatcccagcactttgggaggctgaggcaagaggattacttgagcccaggagttcgagaccagcttgggaaacatagcgagaccccatctctatgattttttttttttttttttttagttagctggacatggtgatgcacacctgtagtcccagctgaggcaaaaggatcacttgagcccaggatttcaaggctgcagtgagmtatgatcgagtcactacattgcagcctgggtgacagagtgagaccctgtctctttaaaacaaacacacaaaaaactcwtaacatggagagtcaagaactctgatttgtttcagatctggatcactcactacaagacctattactttttattttagtcctcatagtgcaggattttatgataaaactgtttagacttgtcaccaacaaagttagtatttcaaaacaaaacaaaagccctaatcccccaaacttttgtgatcacattaagttggatcaacccaaattttccttctggagagagccaagaagtcatagggagcaggttgggtatctctaatccaaaaaatctgaaatccaaaatgctccaaaatctgaaactttttgagcacagatatgactcaaagaaatgctctttggaacattttggatttcagatttccaaattatggatgctcagcctgttaaatacagtgcaaatatccccaaatttgaaaagatccaaaatctgaaatrcttctgaggagttgcagatcagcctaggtaacatagcaagatctcatctctacaaaaaattagccaagcatattggtgcatgcctgtggttccagccactcaagaggctgagatggaagattgcttgagcccaggagttcaaagctgcaacgagcagtgatcacactgttgcactccagcctggtgacagagtgagaccttttctcaaaaaaagaaaggaagggagggtaggacaaagagacagagaggaagaaaggaaggaaggatggaaggaagggagggagggatgaaagagaaaggaaaaaaagaaacagaaagaaaaagaagtggagagagcgaaagaaacagaaagagaaagaaacagagaaagagaaacagagaaagagaaaaaagtaatagagaaagagagagaatgaaagaaacaaagaggagagagaaagaaacagaaaaacaaagaaacagggagggaagggagggagggagggagggagggaggaagggagggaaataagcaaaaaaaaccacttctggtctcaagcacttcgaataagggatactcagcccatgatgtccagcctcacatttctagtgctcctcaagaaggacacggattactgtttgttgccaaggtggcttgtttcaagaccagcgtgattggcaagaatcttccagcaccactgtggcagcttttggtggaaggaatatagccctgactgggaggctgctggggagatgacaaggccagcgcttcagcacatagcctgcagaggccccattgccagtgcctaatgtaactgaacaggccatttgtcatatttaattttagctgcagtggctcaattgggactttatccagactggcttccactctgctagcctgctgtgctccccttgtcccaggctgagtcacttatgtccctggccctccatctgccagcgagacctccgagtcactgatactgagatcatgggccccagatgtggcttttccagcctgtgcrgtaaattaaagcaccttggtgccctttttctatctgcactttaggagcaaagcactttttttttttttttttttttttttgagacagagtcttactctgtcacccagactggaatgtagtggcacaatcttagctcactgcaacctctgcctcctgggctcaaaggattctcctgcctcaccctcccaagtagttgggactacaggcacatgccaacacgccctgctaattttttgtatttttagtagagacaggattttaccattttggccaggctggtctccaactcctggcctcaaataatccacccacctcggcctcccaaagtgctgggattacaggcgtgagccaccgcgcccggcctcaaagtgctttcttactttttactctgcatcaacctcttttctctccaaggaactctgaatgaatgagaccatgagaagaggcttagcctccactcggcttgacaggaggaaaggaaggagctttcccctgaggatagcaggggaggaggtgtcgtcttgcccacctctgtccagggcaggtgtagcacaaggcagcaggaaaagcccagaatttggattcagaaacctcgatcccagttttgaatgtggttcttagttgggcgagactgagtgtctgtaagattgaaccaatgtgcctatagacgagctcccagttgggtgggatgggagggcactcttagatcatcagagagtggggctttgtcagtggtgaagatcagaatgcgcctggcaggtggtcaagactggggctcttactagaatctagtctgttcgagtaccctagggtgggcgattcacagtagtgtctgaagctgaacttgaagacaagtaaattccagattctttcccccccgtcctctcagagacttgattgcttctcttgtcctcactcgctcctcaacctcaccttttgttggctcttttttaccatatgaactggccagtcttcttcctttccagctgtgtgcttctctcctggaaatatttttttattattatttttattatttatttagtaaatatcattaattatatactaatatataactaataactaatatataaatatttgatatgttaatacattatatgtaatataaatatataataattacatataactatataatctgatattctggatattaggcctttattggatgtacagtttatatattttatatttatatgtaatataaatatataatgtataattataatcataacatgtaatataatacattataatatataatatattgtgattgatgtagtatataatatataattacaatttgtttacattatatattatatttwtgttatatattatgtgttaatatgtaactaatatattagtgtatacattagttaattatataatcatattatatattataattatgtattgcatattatattataaaagtatacattatataattaagaatatataattcttataagaatcatattaagaatatataattcttataagaatcatattaagaataaataattattatatcayatggttaataattaactaatttatatatgaatatattagttctatattaatatataaatatattaattacacwttaaatactattaactatatgaatatataaatatattaattatgccacatataattttattatatatgtgattatgtatcagttatatacttaattatatagtaaatattatttatacaatattatttatttacttattcatttgcatttcaacttttattttagatatgggggtacatgtgcagatttgttacatgggaatattgcatgatactgaggttggagtatggattccatcacccaggtagtaagcatagtacttgatagatagtatttttggttttttttttgcaggggcggggggggttggtttttttgttttttttttttttgagacggagtctctgtcaccaggctggagtgcagtggcacaatctcagctcactgcaacttccacttcctaggttcaagcaattctcctgcctcagcctcccgagtagctgggactacaggtgcccaccaccactcccagctaatttttgtatttttagtagagacagggtttcaccatgttggccaggatggtctcgatctcttgacctcgtgatccacctaccttggcctcccaaagtgccgggtttacaggcatgagcaactggctgcttttgtttgtttgtttgtttgtttgtttgtttgtttgttttgagatggaatctcgctctgtcacccaggctggagtgctgtggcgcgatctcggctcactgcaacctccacctccctggttcaagcacttcccctgcctcagcctcccgaataggtgggactacaggtacttgccaccatgtctggctaatttttttttgtatttttagtagagacaggatttcaccatattagccagactggtcccaaactcctgacctcaggcgatccacccaccttgacctcctaaagtgctgggattagaggtatgagccactgcgcccagccgatagatcgtttttttaacccaccccytgcaaaccctctagtagtccacaatatctgttgttcctgtgtttatctccatgtgggctgagtgtttagttcccatttataagtgagaacatgcaggatttgattgtctgtttctgcattaattcacttaggataatggcctccagctcaattcatgttgctgcaaaggacataatttcatttgttttatggctgcctagtgttctgtggtgtatatgtaacacrtttcctttattctaccattaatgggctcttgggttgaccatgtctttgctattgtgaatagtgctgtgatgaacatacgagtgcaggtgtctttttggtagaatgatttcttttcttttggatagatacccagtaatgggatggctggctcgaatggcagctctgttttaagttctttgagaaatcttgaagctgctctccacagcagctgaactaatttacattccttccaacagtgtgtaagcattcccttttctcccgtgccatgccagcatctgttgtttcttgcctttttagtaatagccattctgactggtatgagatggtatctcactgtggttttgatttgcatttctctgatcattagttatgctcaccattttttcatgtttgttggctcacttatatgtcttcttttgagaagtgtctggtcatgtcccttgcccattttttaatggggctatttgctttttgcttgttgacttaagttccctatagattctggattttaggcctttgctggatatataatttgcaaatatcttctcccgttctataggttgtctgtttgctctgttgatagtttcttttgctttgcagaagctctttagtttaattaggtcctacttgtctatttttgtttttgttacagttgcttttggggacttagccaaacattctttgccaaggctgatgctgagaagagtrtttcctaggttgtcttccatgatttttattgtttgaggtcttatatttaaatctttgatccatcttgagttaatttttgtatatggtcaaagataaggttccagcttcaatcttctgcatatggctagccagttgtcctggcaccatttattgagtagcaagttatttgctcattgcttctttttggcagcctttttaaagatcagatggttgtaggtgtgcatttaatttccatgttttctgttctgctcattggcctatagtaccaagctggtttgactactgtggctttgtagtatagtttgargtccagtagtgtgatacctccagttttgttcttttagctcaagattgctctggctatttgagctcctttttggatccatatgaattttagaatagtttattctgattccgtgaagaatgacattggttgtttaataggaataacattgaatctgtaaattgcttttggccatatggccatttttatgatattgagtcttctaatccatgagcatagaatgcttttccatttatttctgtcatctctggtttctttcagcagtgttttctagttctccttgtagagatctttcacctccttggttagctgtattccaaggtatttcattttctttgtggctattttaagtaggattgtgttcttgatttcaccctcagcctggagattgttggtgtacagaaatgctactgatttttgtacattgattttgtatcctgaaactttacttaagtcgtttatcaactcaaggagccttttggcagagtctttagggttttctagatatacagttttattgtcagtgaagagagatcattggatctttttttcctgttggatgccttttctttttttctcctggctgattgctccagctaggacttccagtactatgttgaataggagtggagagagtgggtatccttgtcttgtttcagttctcaatgggaacaatttgagcttttgcccattcagcatgatgttggctgtggtttgtcatagatggctcttattattttgaggtatgttcattcgatgtcttgtctttcgagggtgtttatcatgaagggatgttggattttattgaaaaccttttctctgtctattgagatgattgtatggtttttgtttttgattctgttctgttggtgaatcacacttagtgatttatataagttgagccagccttgtatcccagcaatagagcctgtgtgatcatggtgtattcacattttgatgtgctgctgaattcagtttgctagtattttgttgaggacttttgcrtctgtgttcatgagggatataggtttgaagttttccttcttgttgcatctctgccagattttggtatcaggctgatgctggtttcatagaatgagttagggaggagcccctcttccttgattttttggaatagtttcagtaggcttgatatcagtttttctttgtacttctggtagaatggagcccaagagtttgaggttaccatgagctatgatcatgccactgcactccagcctgggtgacagagcaagaccctgtttctaataaattaaaaaattacagtcacaaaaactgttttaaaaataaaagtttttgaaaccattcttgtcactcagagagtaatttttaaataaattggaattaacaaaaaaaggcacaaaacctttatttaattgatgcataacggatatacatagttttggggttgatgtgatcatttaatgtattcgtgtaattttcaaagatcaagtcagtgtacgtgggatatctgtcaccttaaatatttgccttttctttatgcaccaaayctttttgacagaaaaggaataattgtcagaagcataaagccttgtcagtgtcaagtttctgctgacctcttcagctattctggttgtcatttttttttctggcatcaataagcattttttccctttggataaatatcaagtttattctgattctcaattcacattggcttgcaaattcagatgacactgaagaccaaattactgcctgtgggacaatggactttgtttagttgctaataggggatttagtaratagcccaagagacaggatatgggtctgagattacacttagttgcattttttaaaaactatgttaattataggcttaagtcatgtattcaaatgcagatataagaaatacagcattcccatattttaattggatccttaggtaaagagagttttagccactcagctattaatccagcctgaacaactctgctataaacgcactttyttctgagcgccttttttttttctcccttgccttacatcatgctctgtggcctcctgaacttttccttttcttctcagtatacatgaaatacttatagctacttcattagctttcttctgtcttggatcacaagctctctaagaagagcatctatgtcgattttattcatcagtgtatcacctgacctgcctagcatggtgcccggtatgacacttaaccttaaagaaatatttgtaggaaggatggctgaataggcgggtggatggatggatgaatggatgaatggatggattgatggwtagatggatggatggatggatggatggatggatggatggatggatggattgatggatagatggatggatggatggatggatggatggatggatggatggatggacagacaatggataaaaataataattttttctttcttctatttttgacaactgtgataagatcataacatcctaggctagatggatggatggacaacagataaaaatatttttttcttctgtttttgacaaccgtgataaaattataacattctagggtagaaatggaaccctatttgatgcaccctttaattcttcatcgaagggttcccttggcctctcttccagattggtcacatactgtgtcactaagaaagggctcttgccctcctcccttagaagagtaaactaactttcttttgatcatggaccctggggttcaatttttttcatttgtcaccaacaaagagaatatcattcctgcatggatatcttggcagctgcttgattttccctccttggagaggagagaccagtaaaccttacaccataatctacccaactcctttgctgtgagagactttccaacttttggtactttggaatggtggccctgcaaccgaagaggtcagtgggcaggaccacaggctgcatagctttggagcacacctcacaggggaacagggacccagcacaaaatctgcgggaatggaactcctagaatgggcaacatggcggctctgccattgggctggtagaaggcctgttctgcaggctaccaatatgagagtgccccattgtatcaatcaaatgttctaggcattcttctggggctttcctcacatagaaaatgaaatcatactcttccaagtgttaagtgcatcaattcaaacactggacacagaagmctttaagacttactcgatgaaagcagctggaatcctgagtcttcaaagatatcttcttgtctctaggatgagtggcctgacctgcaagccctctgggtgtctgtcttcactctcactggtgtctctctcggcttctgctggctttaatcttgaatgcatcaactgtcttggactcctaccttgcccatgacaacatgaagtttctctttatgtcactttaggatctracacttccaggacacaacagctctcatgagttgacctgactctttctggattgatctctgtcactcctgtttgtaggctgagagactgctcttctggtctggttagagatgggaagaggtggaaggactgggaagaccacaggctcttcagacaatcctccataaatacagattctcccaggcgagttctaaggcactataggtagcaggaagttggcaatagtgctcttggtaatgtttagaatgtctcttacaaaaccctgtgctggactttgagggattcccatggggatgaatcaagatctttaagcccagactttcctcactgaccctgccttttcccttctcaccatcccctctggactccatcttatgctcttcaagttgtcaagttgtttcctctgaatgactgtggtatttggcctacatcacaattcacctgccacttgccatctcctgggtctgaaccttatccccgctttcagactatgagctcctaagttccctgagagaggatatcatattctctctgtttgcgtagcagtgaaaatcatcaaacttcctgaatgcaaaccctgtctctgtggtttactagttgtgtggcattaggcaagttacttaatctctctgtgcctccttttcctcatcagaaaatgagaagaagaatcatatctgctttccagggtttttgtgaggtttaaataaataaatacatgcaaatgactaaaacagtgcctggcttggaggaagccttcgtacgtgtaagcgcttgtttctgctctcggtggtagttttttttcatttctattttattttattttatttatttttgagacagagtcttactctgtcactcaggctagagggcagtggtgtgatcttggctcactgcaacctctgcaccctgggctcaagtgattctcctgcctcagcctcccaagtagctgggattacaggctcacaccaccacgccaagctattttttgtatttttaaccttgcccaggctggagtgccggacaaggtttcattacgttggcgaggctggtctcaaactcctgacctcaagtgatccacctgcctcagcctcccaaggtgctgggattaccggcgtgagccaccgtgcgtggcctcagtggtagttttrtttctcctggcatgaaggtgcttaggaagcatcagccatggtgtgcatgcatgtgtacacatgtgagcacacagtcttcccccgtcctgtcatctgcatttccaccatctttgtcccttcaccagacaatggcaaaagacaggaccaaaactccagttgcttaaagacccaaaacatggatctatagtggaccaaggggtccccaaaaccgtggtcagaatgacaactcagaatatcccccaggacgtcaaggaagccaggcaggacaaggcctgtcacagactggacaagagacacagacacccagggctctgttttatggctttgcgatgtcggcggctgtcccactctgtgcttacggttggggtcagcagtgaggtgctgatttcctgtatttgccactacccagagggcatggggctccaggttaagatggatgacagcacttcaaagatgaatggagtgaacattgggaagttagggagctgtgcagcggccattatctctgagtgtcctcacaccagggcctaggatctgaaaaggtctcagggcccccaggcgttccatgggccatactttgaaaaccacagcagaagagcataaccaagggagggctgtgtagagaagagcagctgtgaggccggtgcgttcatggggttctaggtataattaagggctgttttacctttctgttagggcccaagggaaattaaacctggccttataccaattgcaaggggaaaaaaatgacgtaaaagagaatggagaaaaatgatggtttcatcagtaagtgtcattcactgctgtagagcaccctttctcaaactctggtttcagctcccctttaccatgttaaaaatgatggatgaccccaaagagcttttgtttatgggtgtcctatctatcgatttttactatgttggaaattaaaatggaaaactttaaaaatatttctgcattaaatcattcaaaagcaataataataaacccattgcaggttaacataaatcacacaattttgtgagaaataactgtattttccaaaacaaaaacatattaaaaggaggacggcattgttttaaccttgtcgcaaatctcttgaggtcctggtagacagcaggtggatgcttgtttctgcttcatacatttcattcatcattagagcaatgacatcgtgccatgtgatgtgtcctctaggaaactccactgtacgcttgtaagagagtgaaagtgaataaggcaagtggcgtcatagcataattataaaaatcattttgacctggtagagccctgaaaagctctcaggatccccacaggccacactttgaaaaccacagctgaagaacctaaccaagtccatgtcacttctttggtctccagcctttgtttttatttatttatttatttatttattttgagacagagtctcactctgttgcccaggctggagtgcaatagcacgatctcggctcactgcaacctccatctcccgagctcaagcagttcccctgactcagcctcccgagtagctggaattacagatgtgtgccaccacacctggccaattttttatatttttagtagagacagggtttcactatgttggccaggctggtctcaaactcctgacctcaggtgatccacccgccttggcctcccaaagtgctgggattataggcgtgagccaccgagcccagctggtctccagcctttataaaaccacactccaagtatttgccttgcccttagagatgtatgttttctcctcctcyctttttaaattgcttataattttttggtgttttttgttgggggtggggtgatcatgtaatggaagcctgggaaggttctgattgactggccctcgggaaccctgggtttgagctcagagcccatgagctgtgtgattgcaagcaggtacttctcctttcgggacctcacttttccagtttatgaaacacatgacttcagcagtctccaaagcgctgacagtctgtgtttctctgagacttaaactggagagaccagatgcctttcccatctgttatgggctaaattgtatactccaaacaatcatatgttgaagccttaatccccggtacctccacatttgactgtatttggagatagggtctttaaagaatgaagttaaaataaggtcattggggtggactctgatccaatatgactggtgtcctcgtaaaaagaagggattagggctgggtgcagtggctcacacctgtaatcccagcactttaggaggccaaggcaggcagatcacaaggtcaggagagcgagaccatcctgaccaacatggtgaaaccctgtctctactaaaatacaaaaaattagccgggtgtggtggcacgtgcctgtagtcccagctattcaggaggctgaggcaggggaatcacttgaacccgggaggtggaggttgcagtgagctgagatcacgccattgcactccagcctggcaacagagcaagattctgtcaaaaaaaaaaaaaaaaagaagggacacagacacacacaaaggcaagcccatgtgaagacaaagggaaaaatggctgcctctaagccaaggagagatgcctcagatgtaaccacccctgtggataccttgatctcagcctgctcgcctccagaattgtgagaaagtacattcctgtggtttaaatcaccagtctttgggactttgctatggcagccctagcagactatacacactatttattatgttctctaatcctgagtccaggcatcttttccaggctgttgctttgaactcaggyttacctctttgttttcaagataattgctctagaagctgaatgaccactatttggagatgtaagctaaagattcttctggaagaatacaccatctggacagctcaggagccctgagtgctgaaagtttctgtgatgttcattcgctttgtctgttatccaaggggagagaaaatgagacacaatgggcatcttcagggtagaactacaccacctttgattaaagagaaatcaagaaatgaagttgaatttctgatgtctgcttactctcatgctgagccttgcagagggagaatgactacagcctagagctgatggcttcaggagctgtagtgtttatcagatttgctccatgggtggccaaagctgggtgatggggtctcaatggccaggactgggcgccccaggaacctcaggcctttctgcatcagcacagatgcttatccattgacttccagtcacttgtgacctcggggtaaaggaacatgaattaagaaaacctcaggctcagtttttccccaaagtatgttgcatggaatacagtttcatgggttgtcataggtcttctgcaaaaaataaaggagtttcgtgaacagacacgtttggaagcttgtgacttaaacagagttaagtgggcttcaccgctgagtgcaacgtggtctccccagcatctttacaatgctgtgttcattacaaatatgtatatgagaaaggggcatttcccaaaccggtgcttctgcagatgggtttgctatgctaggttacccacactggagcaacagcctttccaggggaggattgcttgagcccaggagttcgaggccacagtgacctgtggttgcaccattgtgccctagcctgggcaacagagacagacccggtctcgaaaagaaaataaaaggaaaagaaagaaacagcctttccagatgaccttcagagcttgccatggctgccttgagataccccaatggcgggcagtgggcagtcaaagggcaaatggccagagtagtgagaacagtggaggccatcaacagaggtacaaccacggcctccccctccttttcatctgtcaaagaaccacaagacctgtccggtagacaatagataacaagacctactacatccacagtatccacagttctttttttgtttgttcaaatcattgtcataccctaactctaacggacaagggaaataaaagaaaggtaatttacaayaacatgtatattgcaacgctccgactcagctatcaactgccaagaacaatgcccccccgccccatagacttgtacatccctcctgggccagagccagctctcctaagaccataacagttcttttcgaactatttatagcctgtatccttattaggagtgatacggctgccaacagggcaataattggttcttgaaggggggtgcaaaagagtattacacttttatgtgtaaatcacagatacacatacagcatgcaagcagrtatacagcgcatctgtggtattaaaatttcatagtgggagcaggtaggggatctcagggggaaaaaaagtctaaaaatgcctcatagagaggtgataatgaaaaaaaaaggctgagagacactgatgtggagtgaaggaccagatcttatttccaatctatcacgcaatgatacttttataaaatatagtaaaagtgaattcctagaaaaataaaataggaaaaagagaaacaaatgttaagctccacgtttttattattggattcaaccgacataaatttgctctattgaattgctagaaatgcttttttttattttttatttttttaagacagagtctcacttttgtcgaccagactggagtgcagtgacatgatcttggctcactgcaccctttgcctcctgggctcaagcaattatcctgccccagcctcccgagtaactgggattacaggcgtgtaccaccacgcccagctaatttttgtattattagtagagacggggtttcaccgtgttggctatgctggtctctaactcgtgacctcaggtgatccgcccaccttggcctccgaaagtgctgggattacaggcctgagccaccatgcccagccaatgtttttaaagcttattcagaattggccaggtgcggtggcttatgcctgtaattccagcactttgggaggctgaggcacgtgaatcacttgaggtcaggagttcgagaccagcctggccaacatggtgaaaccgcgtctctactcataatataaaaaattagccaggtgtggtggcaaacgcctgtaatcccagctactcaggaggctgaggcacgagaatcgcttgaacccaggaggcagaggttgcagtgagcccagatcgtgccactgcacyycagcctggatgacagcgagactctgtctcaaaaagtaaaaattaaaatttaaaaaaaagcttaccatttgcatctgaaccacwgttcagactgtttttggatggggagtagtccatgggccacgcccctatctgggggcactgagggtagagaagcagggcctagaagaggggtctagaagggtcaagaggagttggctggtggagaagaaggaaagattgtttcagagagaggaccctagcagaggcaycaagcaggaagtgcatggcacctgtggagtggccagtggcaagttagggttctagcagagagtgagggggcwgaggaakaggggaggccaggcaggaggacagatcaagctgctccagccaggagccagcccacaatcctgcgggctgcattcacaccgtgttctgttaataaccaagtggagcttcatgctttggggtcattgagaatctgatgacatctacctatgcaccctgtcctgaagacattacaaactcagaacatcatctaacaatcttgggagctggttttgggatcccttaaagcttatctaaaatctctaggttcgtttttatttttattttcagttgtattttgagacagggtctcgctttgtcacccagaatcaagtgtgatcatggctcactgtaccctcaaattcctgggctcaaacaatcttcccacctcagcctcttgagtagcggggactgtgggcacttgtcccaactaattatttatttatttttggagaattgggagttgggaggtcttgctatgctgcccatgctagtcttgaactccgggcctcaagcaatccccctgcctcagcttcccaagtagctgggacagcaggcacaagccaccatgcctgaattatatttttaaacttttttatagagaggcagtcttgctgtatttcccaggctggtctctaactcctgaactcaagcagtcctcccatcttggcctcccaaagggctgggattattagtgtgagccactataccaggccaaagtcaccaggttcacaatacctcccaaacagttgagctgataaaccctcctcatgtactcattccttctagtccatgtttattatatcgtaactttgtgctgactccagtactatcaggcctgccagatagacacaggactgacaccacccagagatcattagcctgggatccagacatccaggggcaatgctgagactaaagccaactcctgaactcaagcagtcctcccaccttggcctcccaaagggctgggattataggtgtgagccactacaccaggccaaagtcaccaggttcacaataccacctaaacagccctttcttcagataactgaaaagatgctcttacaaggaccattaaggctcaagataaggaacagccttcgcttggcaaactcccgtgccaaaaaagccaaggataaactcagaacatccagtctggatgaaggtctcagcattgccctaacacacccataaggcccccagtgcactgatcccctcctcctttccttgacctctttttgtctggctgactctgcatttctatctcttttcatggaccctaatgagtttcaccgggtagctatggtggccaaggacactcagaaccggaatttcattgatgcttgttaggattgatacccatttagtggacaatctcatcaatgtttgcatggaatgtaaaaatcagccagcaaatggaaacatacccagagaggcagctggtgtaattggccctcacaaacacatgagaagtgctcttctaaaaataccagggcacctcatactgaaaggcaggccagagactgaattcagcaagagctgaaaacagccaggacaaagtgtttggatcttccagtgcaatccggaaatcatggagcttgatattgaggacccaagggagaagtgccatttcagatttaaagaaaataagcaaatttgagataggccacgtcgttagaatactacccaagaatagtatgtgttgatgctgataaattagggtacaggtacttcaattcgtttattcattcagttgttcaatgagcacttactgggtaccaggccctattctggccctgggaatgcaggaaggaacagaacagatacaattcctgcctgttgcagtgkacaatgagcaaataaatacataatttggagaaaggagagagagattggaagggagaggggagattgttttgcattctgtagccagggaacattgtggtgtaaggaagtgtttaagtagtaaatcttttatttttatttttactttttttttttttcttgagacaattgccctgttgcccaggctggagtgcagtggtatgatcatagctcactgtagcctcaacctcctgggctcaagcgatcctcccatttctacctcctgagtagctggtactgatggacatgcatgaccacacccagctaatttttaatattttgtagagaggtctcactatgttgcccaggctggtctggaattcctgggcttcagctatcatcccttattggcctcccaaagcactgggattaggtgtgagccaccatgcccagactcagtagtaaatctgaatgaagtaagggaacaagtcttgtgggcttctggaggaagaatattccatgtgggaaggatgggaaattcaacagcccttcaacaagaacaagcttggtccagttgaggaagagcaaggaggccactgtggccggagtggcatcagcaaaggtgagagtgagaggagataagggaaggaaggaggaggatgaaccatttgccrtcatgtagatcttggtgtgtactctgagtagaatgggagccatgggarggttttgagctgaggtgcaatattgggatggttaatttcataggtaaatttcactggtcgcagggtgcccggattaaatattaattctgcacgtgtctgtgctggtgttttcagaagagattagcatttgaatgggttaactcgcccagctgagttattctttttttgtgtgtgtagagacaggggtcttgctctgttgcccaggctggtctcaaactcctggcctcaagcaattctctggccttgttcacccaaaatgctgggatgacaggtgtgagccactgcatccagccctttaaagaaggctttaaaggacctgaagatgtttagtctaaaaaaaaaaagaaaaagaaaaaagactggggctgagagagccctttcttcagatacctgaaaagatgctcttacaaggaccattaaggctcaagataaggaacagccttgtgtccggccaagcttttccactgtggagcaggctgcttttccactgtgagcttttgtccctggaagcaaggccctgggggaccacctgcmgggtgccgggagcactgggatctgcctgccctatttcaggttgtccatgcatgcattcattcctgtgatatggatgggattcccattgcccggtgttggggttcgaatattacacaagatccagccctagccctcaaagaaaggagaaggcagtaggtgctctgatggggtgagagtgtccatgaggggccctgttctgacttgggtgagtagagtgatatctacgaccaagctcaaaagcacaagcactttcagccgagctgaatacatctaatgcatctgtgggtctgtgtgtgttggggacaaggatgaggagagaatctgggaccacgctagacatggatggaaaatacaaccagaatgtagcaagtgagaagggctggtggaaactccttctctcagggcccagaccagggggaggattgtgagcccggggaacctgtctttatttcaacttctgacattttgctcaccgtggattttctgcatgatttttgatttattaaacattgcatcaaaatactatttatcttggccaggcatggtggttcatgcctgtaatcccagcaatttgggaggctgaggtgggtgaatcacttgaggccaggaggtcgagatcagcatggccaacatagcaaaaccctgtctctactaaaaatacaaaaactagctgggcatgatggcacacgcctgtaatcccagctacttgggaagctgaggcatgagaatcgcttgaacccgggagtgggaggttgcagtgagccgacatcgcaccactgcactccagcctgggcgacagagtgagactctgtctcaaaaaaaaaaaaaaaaaaaaagaaggttgattattgattatttagttctagggggtgcttaaatgtggttcacagagaatggcactgggaaggtgtcagtgaagaaaacatagtccctgccattctcactcgccatgtcccaggcacagcccggctgtgggttgggaaggtttcccaatatggaacactctagtgcaatgtggggagtttgcatcataaaatcataggatggggcttcaaatcatggcctgcctaacctgaccccctgcaaaggggcagactgaggctacgcagtttgtcctgggggccgggatagctctcctgtcggctgatggcttggggaggattctcccgaagtccttattcagaagcaaacttcttttaccaggcagggagtgttaaagggaaatgtggccgaggaaatgaatgcggctgtcagtatttaccggctcattatttatttatttatgtaggggatttctgttctctctgctaatcttcatataacatgcctcattgccctctgagggccccgagaggatcctcgcagcatttgtagggtggaatttgttcttgaagctctgtttctggttgctcattcctygcttccttgcaaataccagagaggaaatgagtcatctcagagacaagcctctcactcattcctaccagctgctggcaaatccaaggcgtaattggcatttgcaggtagggtccaaaggaaaaagcacatttttttgctttcagtttgaagtcatgtgctcagygacatcaagcattgagaagggagccagccccgggcaaggcagagacaaagggggttggggagcttgggtggagggcccaagggcccagcccatgcccacacacatggtgtgactggcctcctgtctattaaactctctctactacaatactgtggtctttctttatgcagtgggcaggaagaacccctcgggcagtgacatctctcaaatattgtacattgtattcgacaggtaatcttgcaaccctcagccccctccttccctccccctttttggagtctccagtgtctattacttccatctttctgtccatgtgcaattggtagaatttagacctcctaagggccgtgtggagccactgaagatggggagtgccatggtcagatttgcacttttggggggtccgtttgttgacaaaaagagtcaaactctgtaaaatatttgaagagatttattctgagccgaatgtgagtgaccatcgcctgggacacagccctcaggaagtcctgggaacttgtgcccaaggtggttggggygcagcttggttttatgcattttagggagacatgagacatcaatcaaatacatttaagaaatataagccaggcacggtggctcacgcctgtaatcccagaacttcgggaggctgaggcgggcagatcacctgaggtcaggacctcgagaccagcctgaccaacatggtaaaactccgtctctattaaaaatacagaaattagccatgtgtggtggccagtacctgtagtcccagctgcacaggaggctgagccaggagaattgcttgaacctgggaggcggaggttgcagtgagccgagatggtactactgcactccagcctgggcgacggagcgagactccatctcaaaaaaaaaaaaaaagaaaaaagaaaaagaaaaaaagaaatacattggtttggtccagaaaggctggacaactygaagcagggggtttccagcttataggtcgattaaaaattttgctgattgacaattggctgagtttatctgaagacctgggatccataaaaaggaatgccagccgggcatggtgactcacgcttgtaatcccagcactttgggaggctgaggcgggtggatcatgaggtcaggagttcaagaccagcctggccaacacagtgaaaccccgtctctactaaaagtacataaattagctgggcatggtggcaggcgcctgtaatcccagctactcaggaggctgaggcaggagaattgcttgaacccgggaggcagaggttgcagtgagccgagatctcgctactgcactccagcctgggtgacagagtgagactccgtctcaaaaaaaaaaaaaaaaaagaggaatgcccaggttcagataaacgattatggagaccgaagttcttatttgcagaggaagcttttaggtactaggctttagagaaaagaggttgtaaaatgtttcttactagacttaaagtctgtattgatgttaatgctggagagatatcatgaggcctgtctgacccccacttcccatcatggcctgaaacagtctctcgggttaaattttaaaatagccgtggctaaggaggaagtacattcggatggttgaggggccttagaatttcatttttgtttacacattatatttgtatgtatttatggggtacatgggaaattttgttacctgcatagaatgtgtaattgttaccagaaaggggtcctgatccagaccccaagagaaggttcttggatctcatgaaagaaagaattcagggcgagtccatagagtaaagtgaaagcaagtttattaaaggaataaagaatggttactccataggcagggctgctggttgcccatttttatggttatttcttgatgatatgctaaacaagaggtggattattcatgcctcccctttttagaccatatagggtaacttcctgacgttgccatggcatttgtaaactgtcatggcgctggtgggagtgtagcagtgaggacgaccagaggtcactctcgtcaccatcttggttttggtgtgttttggccagcttctttactgcagcctgttttatcagcaaggtcttcatgacctgtatcttgtgccaacctcctgtctcatcctgtgactaagaatgcctcaacctcctgggaaggcagcccagtgggtctcagccttattttacccagcccctattcaagatggagtcactctggttcaaacgcctctgacataatgatcaagtcaggccatttggggtatatccatcatctgagtatttatcttttctatgtattgggtacatttcaagttctttcttctagctattttgaaatgtgcaatacattgttgttcactatactctgtgctttaaaatcttgctgcagaagagatgtggctcatagctagaagcagggagtgggggacacagggagactattagaacactgcagttctctggggaagatggtggacttgggaagaggcagtggggacaggtgggataggctcccaaggaaggaggatggacagatccaacacataggggaagggccacatctcccctgtaacaggagggtaggtgggaatctggttcaggtggaggcaaactggtttggcaacagaggactgagtgacttcccactgggtggtttccgtttgctccagtaaatagcaggcgacgtcatcagctgaaagtgagaagtggttggagatctgagaacagggaagactgaaatagctgcagtgaagacccaagaaggagttttccgggtagacttagcaggcttctctggctgtatcaagtgaccagtttaggtttgaggacatacattgatagtgacaactctgtgtgcctgtacatttttctccagtcttattcagtcgttgggatattggtccagaaaatgcaggtggttggttcaatcccaggttgtggttttgccatgtgagtgcagtgataggtcagtggtacaagaggtaaaacagtaagagggtgtggaagtgatggagaacagactgtaagctggggacgaaaagaagagaaatgcatagcaaaaatagaggagtagtgtctgcagatggccaggattcaaatcccagctcaacctgggatggagtcggatgacttagagctattttttctttaactctctgtgcctcagtttcttcatctgtaaaatgggcagcacagtagcacataactcatcatgttattacgtgatcgaattaacaaggagttaataaatgtaaagtgctgaaaacacagttacatgctagctctcattactttgttgttgttattatttatttttatttatttatttatttttgagacagagtcttgctctgttgccaggctggagtgcagtgacgcgatctcggctcactgcaacctccatctcccaggttcaagtgattcccctgcctcagcctcccaagtagctgggactacaggcacagccaccatgtccagctaattttttgtattttagtagagacaggatttcaccatgttggccagaatttttctggtcttgatctcctgacctcgtgatccacctgcctcggcctcccaaagtgctgggattacaggcgtgagccaccgcacctggccatttttttttttttttagccatcaagtagcctgagggcttccctccaaataggtttagtgggagtaagtgaatgagagaaccagaagaacagaagcctgaggtcagagtgagatgtcccaaatggggccaggatggaaccatgggaacaggggcttgccagggagggtgagggtcagtcgagatagggagtttgggacatagctcagcactgacttggtagatgagtcacaggctgggatctcctgtacgctgtcgctgtgctcagccagcatgtcagaccatctgctccatctggtgaagtgagcagtgctaatattgctggaaaggggtcccgatccagaggccaagagacggttcctggatcttgcgcaagaaagaattcagggcaagccatagagttaagtgaaagcaagtttattaagaaagtaaagggttaaaaggatggctactccataggtagagcagtcccaaaggctgctggttgcccatgtttatggttatttcttgatgatatgctaaacaagaggtgagttattcatgagttttccaggaaaggagtgggcaatgcccagaaccgagggttcctcccctttttacaccatagagggtaacttcctgacattgctgtggcatttgtaaactgttatggcattggtgggagtgtcttttagcatgctaatgcattataattagcatatagtgagccttgaggaagaccagaggtcactctcatcaccatcttggttttggtggatcttggccagcttctttaccgcaactgttttatctgcaaggtctttatgacctgtatcttgtgccaacctcctatctcatcctgtcactaagaacacctagcctcctgggaatgcagcccagtaggtctcagctttatcttacccatcccctattcaagatggagttgctctggttcaaatccctctgacactaatatcaagtcttagagtggtagatgaagaaaagaggctgtccctcccctggaaggttaggaaagggcttctggaagagggtccctgggccttgaaaagagggtgggatgtggacgaaaagggcatcccgatacagacacggcatgggtagtccttgaggttagaatggacggagaagcatgcagtgaagtctaatgtggatggctggggaggtgagtctgagagtgtaggtttatcaaggtctaatcagacaggtcttttggtattctggttttagcacctgccatccaaagagtaggtgaggcctctaagtctggattctgcatactgcgatccatgacgttaggtaggtggacagtgctgtttcattatgttaaatgaaacaagccagacacagaaaggcaaacatcgcatggtctcacttatttgtgggatctaagaattaaaacaattgaacacatggacacagagagtaggatggttatcagaggctgggaagggtagtggggggttgtgcaggggagataaggatggttaatgggtaaaaaataaaaaataaaaagaatgaataagacctactattggatagcacgacagggtgactatagtctataacaactcaattgcattttaagataactaaaagagtttaattagattgtttgtaacacaaaggataaatgcttgaggggggatgaataccccattctccatgatgggattattatgcgttacatgcctgtgtcaaaacgtctcgtgtaccccataaatatatacagctactgtgtacccacaaaaattaacatttgtttgaaaaaaaaggagtcaacagataaaaaccatttgaggagacttgaatggcacttggtgatttgatgagaccctctgtcctgtctaactgatctgcactctcttgttcggtgttcacacttaagagaaatgtaaccatctgtggaggccccatcttctcctcctaggtgatctgggctgtgcctactggtgtcccagagatgacagctgtccatcatcctctttggctggtgtctctattttgccttcagaggttctgacactgagcgattgcacgaggagggctgtggggagggctcgcctccagggagtgaagctgaactccctgctacctctgccatggagatgaataattgtgaacggcccgggaaacatttaaacccacctaaaccatagcacacaaccgaaagcagcaagcagggaatgctttaagctgttaaatgctgtgcgaacatgcacaaaatcctattatctactgtatatattgaaaagctaaaaacagcaaactttctgaggttcataaagcattgttcttggttgcaacttggagatttccattattgctttggctgttggaacctttaggtaatctctttcagaggggggtgagctctgacaaggcaaaggagaggatggttgattgcgggaagatcgcagcccatgaatatatctccagcaccatttgctctgaataaggataatcatttctcgcaatctggaaaccatgttatttagaaaattagggtaagtgcaaaacaaagcaagagtggggaaaaaaacaacgttcatcttagaatatcaggatgccgacaaaaygataaatcatgcaccattttttccaataagatttgcatgagtgtgatttctcatggttactattccactccagtattgatggtaaatttttaaatccatcatttaatatggtccctttgcaagaaagaaaagatcaagatatccacgsagacttcttattgctaatgaaaatcaagcacctctttggttcgattttccctcttgtaaaacttgtatttgcaggaagatttttttgtaagtctcttgaaatctgcattctacattttttttttagatgatggctggccatagctccacaccaggggctcttggcttggaatccactcatctccaaggagtctgtgatcatatctgagtctgtaaacttggtcagaaatataaaatacatgttgatgtttccctaatctctaactgatattagtgtttgtttctttaatgaatgtaggctagacatttttatattacattctagttgttgtggctatcttgaaatacttaaatatcctcttgactactctcaaatttatagtagttagtaaaccaaacagtagatcttgttrtttaaggtgctaaagaagcacataggttatatcatrttttaaaaaaaccaataactatatttcaacatagttagtctttagtaatcctgtgcattttgtttaatttgatgcacttaaatacattattttctgtaattccagctacttgagaggcttacccaggaggatcacttgaccccaggagtttaagaccagcctgggcaacatagcaagaccccatctcaaaaaaaaaaaaactaaactaaaaacattattccgagaagggatccacagttttcaccagatgccaaaagtgtctgcagcacagagctttaagaatctttagctggtttctgacagttagattccctaactgtgataaaatgcagattctgaggcccctcccaaagcctgctatatcagaacctcaaggaatgggatatagacatggatgtttatcagaagctcccccagggagctgggatgcaascagcccagaccagaggtctgtcattgggaacctgtggcttaggttatctgtatcccaataaccatgatctcaggacataggggttggtagacttggtcatagaaaaacaaagtcttcttacacttcttggggtatatgtggtgggaaagagaacagaggttaagcagacccacgttttgaatgaatttggtcacataacttaataggtgtgtgtcttgggcattgttgaccttcatttcctcatctgtaactygggaattatagaaggacctacctaatgggctttgtcttagtctgtttgagctgctataacaaaataccrtacactaggtagctgataaacaacagaaattgatttctcacagttctagagattgggaagtccaagatcaaggcagattctgtgtctgrtaagggcccactttctggctcctagacagtgccgtcttgcaatgtcctcacgtagtggaaggagtgaggggtggcttgttcctctttcataagggcaccaaccctattcacaagagctccactctgaggacctaatcacctcccaaagacccccatctcctcatcctgtcaccgagagggtcaggatttgaacacatgaattttggggagacatggacattcaatccattccaggcctgttgtaggaatgaaataaaataatgcacaaatgaatatagagcactttgcaaagtgtccaacacacagtaagtgttcaagtcttagctgctgtggatggtgaggatgctgctgctgctgatgatgatgatgatgttcttgatagtaatgagctagtctagttagcatttctgaggctaatgagggaactgtggttatggaatgacagcaagatctggcttccaaagcttggtagagaatttcggctggaggttacaatgcagctgagaggccccattgaagctgatctcagtgtccccagcatcagctgtccccccactatgggacagggctgacatgttactgggaacacgaggctgtctgctgatgctcattcagtgatccagaaagggtaccatcattcctccctctcccaaatcttgcatctcatgaaccaggcatctcattttcccaaagaatgcttcccttacagcaggccagaaagctattgtcctagcctrtggaaacacctaaaacacactggggagatgtggacactcagcccattgcaggcttgtaaaaatgaaataaaataatgcataaatgaatatagagcactttgcaaagtatctgacacttaaccagtgttttaagtgtttcaatgggcaaggacaatagttttctgagaggggatttttaatggctctccaaaagcaggcccccaaggtaaataacagaatgtgctgcagattcatggacaaccaactccttcacatccttagagatgaaattctttgaagaaagattttcctttaccaaagctcttctagattcttgactgggtgcagtgactcacacctgtaatcccagcactttgggaggtgaggcaggtrgatcacttgaggtcaggaattcaggaccaacctgaccaacatggtgaaatcccgtctctactaaaaatacaaaattagctgggtgtggtggtgtgcacctgtaatcccagctactggggaggctgagacacgagaatcacttgaacccagcaggcagaggttgcagtgagctgagattacaccactgcactccagcctgggcaatggagtgagactckgtctcaaaaaaaaaaatgaacctcttctagattctctattccttctatcagccaatgctatccaggttcccttgaggcagtgccctgcctgtcattaaatctacggaaaatgtatgaagaacaggtttttctcttaacccccaggtgttcctcataaaacccaggggtggcaagaaaatacaggagcacatcgcatgttttgggacagtcacacatgatgaacttcgtcgataggatggatggcgcttcaaattttccaggacaaagacctggggtggtctctggagaaaccccaagccaatggttctttaaggtttcaagatcaacgctattcagaactatcaaaacccagccacaggccaggcaaagaggctcacacctgtaatcccagcactttgagaggcaaggcaggtggatcaccagaggtcaggagtttgagaccagcctggccaacatggggaaaccctgtctctactaaaaatacaaaacttaggtgggcgtggtggcgtgtgcctgtaatcccagctactcaggaggttgaggcaggagaatcgcttgaacccaggaggcggaggttgcagtgagctgagattgcaccactacactccaacctgggccacagagcgagactctgtcaaaaaacaaaaacaaaaacccagccacacaccccggcatttttacaaaagggaaaaagggatgcattcaagataatacaatgacattcctatgttttctctgagccagagagcagagaaacattgtggctaaggtggctttctttctgatcaaggtttctgtgaatgggcagtgtccacacatgaattctgcctaaaggctctgtgggagccaggctgcgagctgattgcagcagcagaaggcagcaggtaggagatgacattttagaattgttcaaacagaccccaggcctagaagatatgccagacacggtgttaggagagaaagaacaaagcgacaccagaaacaatcgtttaaaaatttaaaagaccatttccctttatcaactccacagctggctaccattccagtaaatttctaaaacatgaaactggccccagcagggcagagaagtgaatgggatggggcaggccagtgacatttacaatctccaggtgcgatatccagctttcctggaagctgaaaaatgaattgttttctgggagagaaacagaaataaaagtattggttggtcataacctcggggaagcctcttgtttctggatacctaatatttataaaagaatagggttcctgtgtgcattttaaaactctgggctgggagcagtggctcctttctgtaatcccagcactttgagaagccaattcatgaggacagcttgagactggagtttgagaccagcccgggcaacatagtgacatcccgattccacagaaaagaaaaatagaggctgggcacggtggctcacacctgtaatcccagcactttggaaggtcaaggtgagcggatcacaaggtcaggagattgagaccagcctggtcaacacggtgaaaccccatctctactaaaaatacaaaaattagcttggtatggtggcatgcgcctggaatccaagctacttgggaggctgaggcaggagaattgctcgggaggccaaggttgcagtgagccaagatctcaccactgcactccagcctggcgacagagcgagactccatctcaaaaaaaaaaaaaaaaaacaaacaaaagaaaaaaaaaagaagagaaagaaagaaaagaaaaaagaaaagaaaaatcagccaggcatggtggtgcacacctgtagccctagctacttgggaggctgagacagraggattgcttaagcccaggagttcaaggctgcagtgagctaggattgtgccactgctctccagcctgggtgacagagcagagaccctgtgtctctaaataataataataataaagtaagtaaaattctacacrttacaagtcaaaatagcagatgaagagtgctgggggcaagtcactctggctcctggaacaagcaaacctccaaatctcagtggcttagtatggtaaaaatatgttccatggttggcaggtagccttcctggtggtcattcagtgactttagcttctttaacactgtggctcctccatcatcaacaggtggcttccaaggtctccatgcagtgggaaaaaagaggatggagaatgcacactggcttttcaaccacggcagggttgtgctttacttagacccacatttactactgagaacaaatcttacagccacatctgtctgcagaaaaggctggactgggtgtactcaggaggctcctggcctttgcctgtaagaattaggaggcgccaaagctgacaccaactttctccaggtgttatcataagtggattaggtctgtccacagatggtgatatggttcggttctatgttgccactcaaatttcatctcgaattgtaatacccacatgtcatgggagggacctggtgtgaggtgattggatcatggggccagtttcccccatgttgtcattgtgatagtgagtgagttctcacaagatctgatggttttataagtgtttgacagttcctcctacacaccctctctctctcctgctgccttgtgaagaagtgcctgcttccctttccgccatgattgtaagtttcctgaggcttccccagccatgcagaactctgagtcacttaaacctctttcctttataaattacccagtcttgggtagtatctttatagcagtgtgaaaatgaactattacagatggttataggcccaagaagagtatcactggctttctgttctggggaacaaaatagaagtttccattcaataaaagggactgagatttgtcatttcttcagtgtataagtacctcctccacttctaggatcctctcctgatcaaagccctaatgtttacatttaaaaacctgaagaggagaaaacctgacttcagttgtgaagtcagctggtggagtaatttaccaattggcaaatatcaagcctgcaggcccaatttcacatagacgggtcatgtcatggttgtgaatgtcattttgtgcctagtcctaagtgaaatgggatctgtatttgtctttccctggctttaaattatctggtatcaccagcagcactgactggcaccatgtcctggaatgtctgatcttttgatgtggcaatatctcctcccctaaggccacctccctccccaggttccatcagtccatgactagacttggcattttgcctccaagttcctaggctctgatacaccatcgtggaacaragaacagcatttctgcccctaaccttactgacgttttaacacccatttcagaaaccccggatttcctgacttccatrgcttctaacccagcagctagtcccacacttttaaaaatttaattgattttatttgcagtttatgcaaaaagaaaaggatgggatggagctccaagaagggttctgagaacattctatgttgaagtaagtaagcaaaggataacccagctcagcatggcaggaccagggctgttcctggagcaccagcagccccagccacaggccaccaccttcctctgggactcagcgtgtttctatctcatgagtagaatggagagtggattcactctgtttaaatttaatttrtagctattttctcactctctattctctttgccaagcctgagaatggagtgcatgttagtttatcagatgtagttccttgcatgcataagttcacagaggaatcacatgggtcagacccctcatcttggctgtaacaaaagcaagtgagaggctgaaccctcctatgcttggaccatgcttctttatgagttgcctcctgccacagacagtatgtttggtggcttggtcccaaaaggggcatccaagtttccttttttttttttttttttgagatagagtctcgctctgtcacccaggctggagtgcagtggcgctatctcagctcactgcaagttctgcctcccaggttcatgccattctcctgcctcagcctcctgagtagctgggactacaggtgcccgccaccacacccagctaattttttgtatttttagtagagatggggtttcaccgtgttagccaggatggtcttgatctcctgacctcatgatccacccacctcagcctccgaaagtgctgggattacaggcttgagccaccgcccctggcccaattttgctatttttatttattttattttattttttgagacagagtctcgctctgttacccaggctggagtgcagtggtgcgatcttggctgactgcaacctccacctcccaggttcaagtgattctcctgcctcagcctcctaagtactgggattacaggtgcccaccactgtgcccagctattttttttttttgtatttttagtagagatgggatttcaccatgttggccaggctggtctcaaactcctgacttcaagtgatctgcctgcctcggcctcccaaatcactgggacctgaggcataagccaccatgcccagcccaaatctgctatttttaaacaacgacagggatggggagacaagttggaggcctgagagcctgcccagttcctcctgctcctamaggaactggagaggagtgtgagtgacagcttctcctgtcctctgttgataccctccattttcaagccccagtgmccctaactactggcactgagcaggcaggctttcaggcagaggcccctccaggccctggaagcccatggctctgttttctgcaagcctcttacctctaccattgcttctgtgtgctggagtccatgctctgtccactgttcctagggatgtctgtggccatgaacacatccccatggacctctgagcagtgcccagtaatcatacacattctccaagcctctgtgaacccactgacaccacctgacagcagttccactcaaggaaatccttcagcttgctctgcttccagccacttaggccaggctgcagtccaggtgtctggggggccgtctagtgagacaacaagagagtcctcacagccaggcagggcaggaagcggcctggcccaccaacagcccacacccattgcgggctgtgcaacagggaaaaacagaatgtggacagagggacacacagtgagcctgtaacccctatgccaacatcagcagctaccacttcctcacttcctctgggtcctcacagtcattatctccaacctgcccctcccatgggcccacacagaggtggtggcaccgctaccactcaggaaacagttcacttcacagctacacagctattctcttggctagtaaataataactactttggtttttctcagcatttactatcatgttaatgagtgttccatacattatctcatattaccttcacaacaaccctcagatcagctgctgtcatgagctacttttttttttttttttaagagacaaagtctcactctgttgcccaggctggagtacagtggctcaatcacagctcaccgcagcctggaactcctgggatcaaacaattctcccgcgtcagcctcctgagtagctgggactacttgtgcatgccaccatgcccagataacgtttttaaaaagatttttgtagagacggggtcttgttatgttgcccaggctggtcttaaacccctgacctcaagtgatcctcccttggcctcccaaagtactgggatgacaggcatgagccactatgcttggtccactccttttttaagttgaaaataatttttatttatttatttttcagagagatgggatcttgctatgttgcccaggccggtcttgaactctcggtctcaagtgatcctcctgcctcagcctcccaaaacactgggattacaggcataagccaccaagcctggccctcagctgcgttttatggctaaggaaactgaagatcaggcataaaagtagctaggcaaccgtgagacctagcctcaattgtgggcaactcagtagtaattggcaatgactttgatttcaactcaaccaagagccaggatttgaacccagtgctgtgactccaggactatctttctgtaatgtcatgccatacaatgaaataacaaaagggtttgtggaaagcatgaagccttatgggccccacattggtgcccagttctaggtgatgtcttttagggtcctcttcatcctcttcctcccatctgcagggatggttctgcccccattacccagctgtcaccactggatctctctccatttgccagcccacctgccctgaccttgagtcctaatctcaggcccttgggcttggtggcttgctgcaaggtgcttctcaagctctgccgacagttgagagctctgtcctggcccagatctcatgtttgtgcaccagatccaagttttgtgaccttgagtgagggattctcacatctcatgggccattttttaggaccaccagtttcaattttccattgtgccataacacaccaatacaccaaaacagcaggagttgcagcagagaaagatcattggtcagccaaatgaggagatgggaggaaacctaaaatctgcctcctcaaaaggtttgggatggagttttcagggggtttttaagaggatgggygattggctaaagtgtggggattcctgactggttgagaagcaagaggatgaagtcctgggacaggaagatgaagaaactgtatgcctgtcctgagtcagttccttggtgggggtcttcagattggttagccattctgctggaattcaggattaaacacacacacacacacacacacacacacacacatacacaccttaagcaattattgggttaaaaggtccagtgttagagattttatctataggaacaatgagggagcaggtagtcagtgtgctacgtgacccttgaatagttagcaactgcagggaagtggattaaagtgcacctgtgtaccctgatcaatgtctaaccataattctgcctaaagcctggcttgtaattctcgttaaccctatgagggcaatttcagcctccttctggcatctcctgagtaatagagaagagttcaggaagttgccagtcaagcttctttccaaggggtatctcaggcatgcctggctggctgcatcataaagaacaggaagtccatattagatggtggccaatgtgcagatgtgcagtttagtgtggcagagccatgctggctgagcagtgctgacttctcccaagtcctagccccaaactctagacaacccagtaccactgtcctttctgcagacttatgggaccagtaattgggaatgccttttattttgcctttaccaagttgagttcagttagggaatctgagtgccagagagagtgatcacaagctttgctgggcttttgggccatatgacatcaatcatgctatttatttattttgagatggagtctcactcactctgtcgccgaggctggagcacagtggcatgatctctcttcactgcaacctccaccttctgggttcaagtgattctcctgcttcagccttctgagtagctgggactacaggcatgcaacaccacacccagttaatttttgtattttagtagagacaaggttttgtcatgttgcttaggctggtctcaaactcctagcctcccaaagtgctgggattacaggtgtgagcccaattatgggattacaggtgcctggcccaattatgctctttaaaggatgtggacagacccgtcctcttcagatcactgtatgcagtctgaaagctctggccctttggtgttgaagacacagaattaaatataattcactattcttttatagttaaacatagcttatctataattgtgccctaccaactcctttaatcccaggcaaaatgcaaagaaatgacagtagaaggatggaggacatgcatggataagggagtgaatacagtgttttcrccctccctgctctgccagcttctacaccaaaggttctaaagtcattttcaatactttcctggcattctatttttaagctctgaggaaagaataaaggctatgagcctggcagtgacatccatgtctaaattatctttatacccctggcagcgtttagcttggagctcttagtaaacatgtagatagcactggattgaataactaaggaaggtaaattgttagaagttaaaggcatcaggctgggtgctgggaataccaagaataataaaatgcttaatacttacttagttgaagctgttgtagagagaggactaatggaccagtgtttgaactgtcagagtcgggaggacagaaatagagtgagagctagtagatgtgaagtagtgggtggtagggaagagggaatgcaggagaggagaggaagggatgggagcmcaaaaaaaaaaaaaaaaaaaaaaggaagggaggtggggagaataggacaaagccaatctagacatgcctgatccaggctactttttaggctttttttttttttgagatggagtcttcctctgtcgccaggctagagtacagtggtgcgatctcggctcactgcaacctctgcctcccaggtttaagcaattctcctgcctcagactcctgggtagctgggactacaggtgtgtgccaccacacccagctaattttttgtatttttagtagacacggggtttcaccatgttggccaggatggtctccatctcttgacctcatgatccacctgcctcggcctcccgaaagtgctgggattataggcgtgagccactgcacccagccttttagccaattttctaacatcaaagccctggtcctctatgacagtcacaagctatctatcaggctgggtcataagactgggatggattttgttttctttttattaattattatttttatttctttagagacaggttgttactctgttgcccaggctggagcgcagtagcaccatcatagctcactgcagcttcagtccccggggttcaagtgatcctcctacctcaaccacctgagttgctgtgactgcaagcatgcgcatccatgcccagctaatttttaaatgttttcttatagatggttgtccaggctggtcttgaactcctggcctcaagcaatcccccccagctcggcctcccaaagcattgggattacaggcattagccaccgtgcccagcctgggttgaattttaaaatggtgaaaataaacccatattattcttttcagtacatagtaacagcaacaaaaatcaaaagaaaagaaaaaagtcctcccagccctacttctgggctctatagatcaagctgctttcaatctgcatttcttgacttctctgaactgctcatcacaaaacacttcatcttaattcctcttgccagtcaatgacttgcattgactggcaagaggatccacgtatttagaagttcttaccaccgcggtacttaaattgagatatgtcttgaggtccatatttgtcaatcccatttctgagaagcagtcataaataaagcagaagattgaaattgaattttttaaaaggactttaggaggaaagccattatgcaaccgtcccgtttagtgaaagagaatgttgatttaaactgggaaaagtcagctcaccatctcyagcatggcagagagaaacgctgaggaaaattctccctattttcaggagtagtagcttgctcctctgggaagraggttaccagaaaggcccgcaaatgattggtaggatgcgagtaacaaattaaaatattctctttgccagaaacctgtgttgttgagaatcagacaaagggctaaaatttgcctgcgcttggattaccagatggtgttatttacgtaatttatgcgttaaatttcctccagtgttgcttttaacaatgtaaatggatttaaatggcttcctaagtgaattccttttggtaaaaagaagaattcctgtcagtaggaaggaagacatcagagacacatgctccagaggtggtggaacatcactctctatgttacagaacccgccatagctcgcccatctggctctgcaaacccaaacactgacattgcaattgcagcgagagaaagtgaggcagttattgcagggcgcccagcaaggagaatcgggcagctcatgcttaagacctgaactccctgatggctggtagggaagggtttttgtttgtttgtttgtttttgtttttgttttttttgacagagtcttgctctgttgccaggctggagtgcagtggcacaatctcggctcactgcaacctctgcttcccgggttcaaacaattctcctgcctcagcctcccaagtagctgggactacaggcacccgccaccacacccagctaatttttgtatttttagtagagacggggttttaccatgttggccaggttggtctcaatctcttgacctcgtgatccacctgcctcagcctcccaaagtgctgggattacaggcatgagtcaacgcacccggccctaggtaagggtttttaaaggcagagaggcagaggttacaggcaaagtcagaaattgacacatggaagctgtacattgtttcgacctataaaagtaggactttttttttttttaagactttctctcttgttgcccaggctgcagtgcaatggtgtaatctcagcttattgcaacctctgcctcccaggttcaagcaattctcctgcctcactttcctgagtagctgggactataggcatgtgccaccacacctggctaattttttgtatttttagtagagacagggtttcrccatgttggccaggctggtctcgaactcctgacctcaggtgatccacctgccttggcctcccaaagtgctgggattacagacatgagccaccacgcccagccaaaaagtaggacatcttgaagcagggcccaaaggtctaaggtggagtcaaagattttctgatttgcgattgctccaggaygcaaagctytgtgtaaaaatctgaggtcagcagaaaagaacattagtgctccctcatggacatgacctcctccagaccccttgggaagaaatttagaaacaagcactgtggtcagagttcagtccacagttcccccttatctgagagtctacctgccagcaaatcccttgagtggggtctgagtttctgaaaaacagctcaagaacatatgctaagatgttatcttattttttttattttttatttttgaaatggaatctggctcttcacccaggctggagtgcaatggcacaatctaggctcattgcagcctccacctcctgagttcaagctattctcctgcctcagccttctgattagctgggattacaagcacctgccaccacgcccagctaattttttgtatttttagtagagacggggtttcaccgtgttagccaggatggtctcsatctcctgacgtgatccgcccgcctccagccttgtgatcggcaaccgaaagtgctggaattacaggcgtgagccactgcgcccggccggctggagggttttatgggagagggatatggggaaactgtgtagaggttggactcaagaagcaactgaggacggcagataatctgggcaccagcaagagtcctaagtgattgggaacttcttcgtccttggttagatcccaatgttcctgtaaacctttaacaaaacatagtggtgtacctacttcccctgtaatcccagagttagtttcaaaactatgtgattgctgctttgcattgtatatcagtgctctcaaattatcctaacttgcatgcaacaatgagtaaattccccttaaacaaaaatggactagttatgttaatttcttgttgtttcactgttacgttaagagacagtggtgatbtkccaggtatctatgtgcctatgctttcaggaagaaagcttctgaaaatagatcacaggctttcaccgggagggttttattttatattttattttattgcattattttattttgagatggagtcttgcttgtcgcccagactagaaagcagtggcacgatctcggctcactgcaacctccacctcctgggttcgagcgattcgtctgcctcagcctcccgagtagctgggattacaggcacctgccgccacgcccagctagttttttgtatttttagtagagaaggggtttcactatgttggccaggctggtctcaaacttctgacctcaggtgatccgcccacctcagcccccgaaagtgctgctagaattacaggcgtgagacaccatgctcagcctacaaaatatttaaaaattaggcgtagtagtgttcagctgtggtcccagctactcgggaggctggggcaggaggagtgcttgagcccaggagtttgaggttaccatgagctacagtcatgccactgcactcgagcctgggagacagagtgagatcttgtctctcttaaaaaaagaagcaaagaaaaagattcaaaaaactttctgctacctggaagggaattttggacagattaaaagaagtattgatatacccagcagtagttcagatctgatcgggtagtgtgtcttccatgatctagaaaacattcctgaattcattacttggggaattcctggcagtctccagatgattcctcaagaaagtcaacaccggggtaggcagcctctgcggtctgctgttttctgttagcagaggccatagttctgcagactgggccatggtatcttgagatgccagagctgaaagaaacctcagagatagccccctgtcatttacagatgagaaaatagtttccgggggaagaatgcatgtgcctgacttctgggagaaatggagccagtggcctttcccactagagagtaaaatgattgatctttcttgggtctatctcagctcttgctagagaacatctccccactgattccaggctaggctgggctggctgatgttgacatactgtagggtagatttgcaccagaaggggtgccagggaacagcattcttagaagcatcagggtggttctgggtttgtgggaagagcgtttgggaagagactcaaatctagctcgtgttgagttctataagggcccttggttgactgactttaactttctctgcctggcatattatatcttctagtctatttccttttcctttctttaatttgttcctcttttcccacctcctaggccccctctccagacaatttcgctgcttactccctccagcccctctccattcattaatgtatgtacacattcactcattgattaagaactcagaactcwttgggtacttacttatgttccaggcacagtgctgggcagtagggacacaggatgacacagtctgtcctcattgaggtaacagcctagtaaagaagggagaaagtaattttttttgcacgcccacatgctggcaggatcatgcaattacaaccgtgataagggctatgctagcatgttatagggaactctgtttttatctggggcttccttgagtaagcactgatggagctgaaagccaaagtttgattaggagttaactaggcagatgggggaggagtgtcccgggcaggaatggggcacagggaaggataaaaggaaacatcatgggattgaggggagctgcagagatgaggctgcagggggaggctttgaagaccacacgaagattgaggatttattttcagagtggtcggtgggagccatcgaagtttgcagggccgtggaatgatcagttccaccctggctgctgagcggaggtcagactgaatggagttggattcggaagtggtggctgtggtccaggtgggagatggtcgtagcttgcaccaaggtgatgagggaggagaaaatgatctggtggtcatagtggatgtgaaaggaagtggatgcagttgagctgtagtgaagaggcatcatctgcaggacttggtgatggattggctggcgcctagggaggaagtggtgaggatggtgcctggctttctttctggtatatgtagcttccttgctcaatttgagtgacggaggtcgtggggagagagaacacactgtctttctgctccgggccacctgctataatagcatgcaagctctttcaagagagagctgccccctgttagtgccttgaagatccctggaaaagtggctttcacataatcagggcacccagggttctcaatttaatggcacaattgaaaactctcaccagaatattttggatccaaacctacttatgcccgaatgatccttcctgctgcttttgagaaactcctggcctctaaaagtcacaggacaagaccagaccttgaatattagaattctatgacaaggtgagaacagctgcctcactgttagggcagtagattccaaagtggggtacacaagatgaygtggaccattagagggacaagaggaatatattagcactcatattctaatgtcatttttggatttctatatatctaaatttttcatgtgtaaaatatattagcatagtagtatgtgcatgtactgaaaaataaataaagtaaayatattggagaaggtatgctttacatttttaaacatcaaaaatgtttggagcccatagcctgtgagcatagtgaatataaatgaaccagtcatgttggctttgatggcttggcctcctctttcctccctggctgcctaggctcctcagtgacaggtgcccaggggagcaggtggcctgggcagtacctggcaccctgcatcctcatttgttgcctgtggctcttccggggtccctgaagctactatccagctgtccaggctgtggcagagcacagcccttgcttaaattctttcagcttctgtaaaattgagtcatcagatcacaaccctggaaatgatattagaagccttctaagctggtggctctcaaatgtggctacacatctcaatcccatggggggcctttttacatacacccaggtgcctcaacttcatccctggggaatgtgatttatagggctggggtgggatccaggtgtttgcaattttatttcattttatggatggatggatggatggatggatggatggatggattgacagggtcttgctctgtcatccaggctggagtgcggtggcatcatcatagctcaccgcagccttgaattcatgggctcaagtgatcctcctgtctcagcctcctgagtagatgagaccaccgccatgtgccaccacacctggctaattatttaattttcttttgtagaggctggtctcgccatgttgcccaggctggtcttgaactcctggcctcaaggaatcctgctgcctcagcctcccaaattgctgggattccagtcatatgccactgcgctgggcctagtgaaagtgtttagtaaatgatgaagttgaatgtatgaatgaaacatgtatcaaaagatgtaactaaaccaacgtgccactgaagactctccaaaatgatgaaaatcaatccccattgacattcatctcccatagtgtgtcttcttccaggacatcagctgtcaggaagcagaacaatgtgtcctgcctaagacttcccagaccccagagtcttgtgatggtttcttttgcctcatcccttccatattccagaggcctgggtagtttagggcaggctttttgccccaatgaatgaagcttcagtatatccagtggctaggggtcattcataaccctccttctccttccaagccatatccaatctattgttgatgattttgcctattaaaaatccctcggccaggtgcggtggctcacacctgtaatcccagcactttgggaggctgaggcaggtggatcacttaaggtcaggagttcaagaccggtctggccaacatggcaaaaccccatctctactaaaaatacaacaattagccgtccacggtggcacacgcctgtcatcccaactacttgggaggctgaggcaggaaaatagtttgaatctgggaggcggaggttgcggtgagccaagatcatgccactgccctccagcctgggtgacagagcaagactctgtctcaaaaaaaaaaaaatccctcaaatctatctacatctctattttgttgctgtcactaaagctatcagctcttcttccctgcaaaatagcaaagcattcttgttttctccatctcccctcttcatgctgccagtcttttccccacagttcagccagagtgatcttttcaaacccaaattcttcagtggcttctcatttacaacaaagatcaatttctttttaacatgacctccaggtmattgcctggtgtggaccctgcctacctctccaatattttccactmttctcctctcttccagccctactttctgaatccattttctaygttccagccacatggctattctttcagctctttgaatatcctctatgtatcacttatstattgcagtgtaagcccaaatttagtggcctaaataacaattgattggattaagattctgaagtttggaagtctgggctgcggtcagccaggtggttcttctgctccacatggccctggctatgcttatgcacacactggcattccactgatgggttgtcttgggggtgtacagtctcacatggcctcactcccatgccttagtcttcagccatgatatctggaatagctgggcctctattgctccattgtcttttatcctcagcttccttacagcctgacgggctcagaattccaagaggaagaaagtgcaagccgcaaagtctctaaggcctagtcctgggttgtgtgagacatcacttctgcattctgttaatcagtgcaagtcataaaatcagcccagattcaaggagaggggaaataggttcagcctttttataggaagagcaaataagtcacattgccaaggagcatgggtggaattgttgctgccatctttgaatacagtccagcacaccctgctctctccttcacaaggtcattgcaactgtgctggctgcccctgggcttgggactgttgcccacttcctctactcagctcagcctagcccttcagacttcaccttagtatcctttcctgggggatgctttctctgagcccactggccacatcctcgtgttacacgctagatttttagccctgtgttgttttccctcatggaaaagctccctttgtgatggtgcatttctgcctgtgattctttgattaatgcatttcccttgctagattatccacttcatgacagcaaggaccttgtctactagcacctctcatttcatccccctgcccagcccagtaggccctgaatggatcattttttgatgaataaataaatggatgagcgtctgtttctggagtcaccacacctcctggaggcccatatccatttaagcagggccacttccccacttccctagcaaagggtcaccaagaacyctgcggtgggttctttgcctccaggactggtcccagagcttggagcrtgccctcctcctggcccattccaacccatctggaagtcctcctccctccactgtgtgaggagccacagcctggggcgctttccatttgggcacttccctctgctcttggcatcagcgacatgccagtcagagtcttgttcctacctttctgtgcatttctcttcatttcttcagcctgcctaggaactcaccatgtgggctggtaaacactgatgtagagaatagatccgcaggaccctttcttgggaccagctgtacttgggatactcatagctgggtcttatgtgtggtagaaacataaactggatcgttccctttagagggtaycccttttgcttccagacctcttgggtggactcagaggccaaggtggaatatcactccttccgggaatacccctccataggggacttagctggactgttggtttattgctaaggctcaaaagccttcagtccactttcttgcatttctttccatctgctatgtaggcctggttgcttaaccactggcagacttcacatcagctcatcatcacttagagccagcccatgagctgtgctggtgatcacccccagccaacacagagcagagcctgaggcctgaagaatcacttgtctcccaggcatcttccagcctcccttgcacagccatgccgccacttggatccgtgcagcagcaggctttgacctctgaccctaggatgtcattggtgccactgcaratccatggagcttcctctgcatatatctatatgcccagctctgtcctcactgtttcccctgctcactgtggttacaatgcaggtcagaggcaccaaccaggcacccagagtgagggacagggctgtgactgaagagaagtcaaggggtctacagctgtaggtcagctctcccagggcaggaagggccagtgtctgctgctgtcgcatgtggtcgggggtgtggttctgactcctccccttactgactgtggggttatgaaccactttctcyacctctttgaccctcagtttcctcatctgtgataagctgatgagggagttggttttggtgctttctgtcattactggactggtcctggagtttggagcaggcagagcaggtatacttgcctctctaaggggaggggcctgtgaaagtggagagtagaggagagatgagcaagaggagccctcgtcttctgtctcacacaagaggtgcygctaatgacagttcatgtttaggatttaaaatccagtctgagtcactggaggtgatgagctaaagtgcagacttaggctgaggcaggcaggataatgaccacagtgcatgcccagtgatggcaatgttgtgggcatccaggccagcagcaggattccagggcaggcactgaccctggcagttcaccctgggmttgctggaccccacagcagggcataccttcaagacatctgctattccaggagcctctgagtcctccccagactctacagggagagctgagggactttgggtcaatgcacactkagtgtgctggctgatatccacaccacagagcccaggacaggaagcccatgtctctgccacacaggacagatgtgctgagcttcctgccacctgtctgttacaccatctccctccccttgtttaaaaggcttggtgtccagcacagggctaacacagccaacatatggctcctccatcctctcacctccactcctaacagctacatccacttgaaccctcttgggagtttggctgcaccccaggcatgaaagccatcctgaccttggtctggatggcttgtggaggacatagtgccaagtcagactggcttgtgggttctgttcccacttggcacctgtgttcttatgactgggtttcaggcttttgctaaggtctcttatgcgcctgtgtctgtcatccctgctaagtccttgaagagttctgctttgcttccatccatcctcctgagcctccccaaactgagattcacgcccgaatctactttcccccatctctctgtttatctatctatctrtctgtctgtctgtctgtctgtctatctatcatctatctatttttataatggctttgtagatatattcacataccattataattcgtccatttaaaatgtgccactcaatggttttttcagtatgtttgagctgtgcaaagttcaccacaatcaatattagaatgttttcatcaccctaaaaagaaccaccaaacccattagcagtcactctaccttcctccagccccctgcccaccacctcccaagcaaccatcaatttatttaccagacatttcatataaatggaatcatagaatatgtagtcctttgtgatttgcttattttgcttagcatgctttccaggttcatccatgttgtagcatgtatcaacatttcatttttttcccaaataatatcccatcatatggatatgttacattttatttatgcattaatcaattgttgggacatttgcttaatccaaggtcatgaatttttactcttatgttttcttctaagagttttatagttttagctcttatgtttaggtcgttgatccattttgagttaattttttatatggtgtgaggtaggagccatgtccattcttttacatgttgttccagcacaatttgttgaagatattatyccttagcccactgaattgtcttgacacccttgttgaaagttagttgaccataagtgtgagagtttatttctggactttcagttctattccattgatccgtatgtctgtccttatgccagtaccacaccatcttgactatagtagctttgtattaaattttgaaattggggagtgaagtcctcccagtttgytcaaggttgttttagctacttgaggtcccttgtttttccttacgaactttaggatctgcttgttaatttctgcaaggaattcagctgggatttttatagggattgtgttgaatttttagatcaattttgggtgtattaccatcttgacaatgttaattcttccaatccttgaacatggtatatcttttcattcattcactgagtcttgcaacatcattgtgagaccctgattctttatatattgtccgtaccttgaaattcagcygccttgttttactctctaagacaccagtttcctgtctctattcccaggccctttgccaacatttggcctccttgacttccttccatggccagcagctgggtctaacctaacatgcgagggcatctagctgtccwgtcccagatcaaagaagtctggaacatctattctctactaaccacttagcccacaattcctcctggaagaagcaagcaaagtgaggattcttgcttatgggagaattttctatctgtatcgtttccctgtgstataaccraagttgggaaatagaaacagaacatcatacacgcaaaacaaattttgccaccaaattcagccaacaaaagtcaagaagggggtatgtagacactcaagagtgtcccagtattcttgctttggtggttactgggagactaaaggtggaatggcttgaagtaacccatcttggaatgagcctacctgagtcagctcacctgcaaaaactgtcacttatgcagagcatacagtgtcttcacagcagaacagcctyacaggctcctgaaacttttctgtcattttcctttttttccactggtactaggaacctcatttccataaattawtttttttttttacaataaggttttttttttttttcccacctggaccaagagaagttggatagtccagctttccttttggagcaggtccttacggcctaggtgcctgccatccccatgcagagggatgagaagtcccacatccttgggcttttgcatccctcaaaggcagccatcattgcaactttctttctgaatagttcagtaatagcaagcgacagctgctcataatggcattggagtggatgcttccagaaggcttggcatctgtacctgtaggactccaaagtagagcatattaacagtgtagaactaggctgggagtagtggcacatgcttgtaataccaacactttgggaggccaaggtggaagaatcgcttgagrccaggagtgtgagaccggcctgggcaacatagcragacctcatctctacaaaaaaatttaaaaattaactgggcatggaggcacgtacctgtagtcccagctacttggaaggctgaggcaggaggatcacttgaagccaggagttcaaagttatagtgagctgtgatcgcaccactgyactccagtctgggtgatagagagagaccctgtctcaaaacaaaataaaacaaaacttaacccagaactagatcattatatacatcttgtgctgatatgaataaagatctgtttcttagtatgaattttccattctacaytggcagggcgcagcttcagccagatgggaaaggcagccttcagggatgtcagttgtgcattattgagaacataagaaaactcatgtgttgccatgggcagcttaggtttatgggcctttcttacctagaggtggattttatatcctgagctgttgtttctataagaattctcccaagcctcttttttatatgttttagtcaggttaggttagaccatgctgcagtaacaaaccaaccttgaactctcattggcattatttatttatttatttatttgtttagaaacaaagttttgccctgtcacccaggctggcgtgaagtggcactatctcagctcactgcaacctccacctcccgggttcaastgattcttgtgcctcagcctcctgagtagctggattataggcgtgcgccatcatgcctggctaacttttctatctttagtagagacgaggtttcaccatgttagccaggctggtctccaactcctgacctcaagtgatctgcccacctcagcctcccaaagtgctgggattataggcatgaaccaccgtgcacaacctctcattggctttatatattaaaatgtattttacgtttatgcaaagtcagctgaaccattgcttttgggcttggggagggggcatagcctctgggaatttctttttcaggctgatgaaatctttgtacccctaggtatggctctgtgggggcagcatggaggtccttccttgctcacgggtggcccacattgagcggaagaagaagccatataatagcaacattggcttctacaccaagaggaatgctcttcgcgttgctgaggtctggatggacgattacaagtctcatgtgtacatagcgtggaacctgccgctggaggtagggatcaccagcctttccccaccaccccagtacagtgatccttactgtttgatcactatttatttaataaaccaatcgttcctccccagaaaatgctcatgcttagaaaaattatgaatgcatttcaaagggattcacagatgtctcagctttagaactcytgcctaactccagggctagcacaatggaagtctctttaaatccacttacagagattagaagggtcttagtgtgttaatcccagtcttattatgttaatctggctgccctgctcctgatgatatgctgtgtccaggaagttcttgcccagatacttcacagcagacyyttcatcytgccagtgtgtgacttcccatggagctccagctgccccgtatcatatgcctttactctatgccaaatcccctagctcttcagctctcctccacattctgctcagaagatggcccaaggaaatttccatgttactgcagccccacaggagtgtcatgcggtagttgtatattagcgtggtttgaatcccaactctatcatttatgagtcaggagatcttgaccaaatccactcatcttctctgtaccattcatcccttggtatccacaggggatttgttccaggattccctgtggatagcaaaactcacagatgctcaagcccctgatgcaaaatggcatagtgtttgcacataacctaagtataacctcctgtgtgtgtatatatatgtataaaatatatatttatataatatataaaatatataatataaagatttatataaatttttttatggcagcacaaaatttttttaattttatttttctattagttattggggtacaggtggtatttggttacatgagtaagttctttagtggtgatttgtaagatcctggtgcaaccgtcacccgatcagtatacactgcaccatatttgttktctgttatccctcgcccccctcccactcttcccctgaagtccccaaagtccattgtatcgttcttatacctttgcatcctcatagcttagctcccacatatcaatgaaaacatatgatgtttggttttccattagaataatactctcgaatctcatccaggtcgttgcaaatactgttaatttatttctttttatggctgaatcatctctagattacttatagataatacaatgtaaatgctgtgtaaataattcttatgctttatttgtattttttattgttgtattgttcttactgggcttttaaaaaatattttcagtctgcagttggttgaaccgatggatgcagaaaccatggatataaagggttggctgtaccttattttcctcagctgtaaaatgaggataatagcagattctccttcttggggtgattgtaagaactaaatgaatttatacatgtggcatgctgagagtagcacctggcacagagtgcattgttcgtcctatgctgcacagcagggtaacctgcaccctcagccacagctcagtttatctcctcagccagagcacccataggtgtctgagccatgctggaaagtcacctggagtggtgcccattgagagatggcagcccctatgtatcaggaggctagagcccagaacagaagaaatacagttgaatatgtgccagatatgtgggtcaagaagataaaagtgaatttattcaatgttgttataagttttgaaatacattctcaagaattaaaaaaccccttctggacacttagcactttttagctgttaagtaataagtgcttttagccattattactattatgtaaagataggtaacattcgttgagcacttactatgtcccaggtacctagtaagtcgttatttgtaatatcttatttaattctcataacaacctcatgacataagaactgtctgcctcagtttcctcatctataaacatggattattaaaatttatctgataggactcccgtgaagataaaataaggctgagaacagagcttagcaaatattaagagttccataaatgctagcttgatatgaatgtattatgatgttcattttacagatgaagaaattgaagctatgagaagctaaaaggggctcgttcaaggtcccacacaaagcacatgggcagggaagtcagttcaggtcctcatacaaaacctcaccccagccctgtgaaatagtgaaataggtattattattattcctgttttataaaggggaattttttttttttgagataggatctcactctgtcacccagactggagtgtagtggtacgatcttggttccctgtaacctccgtctcccaggttcaagccatcctcccacctcagcctcctgagtagctgggaccacaggcttgcgccctctacctgtctaacttccgtattttttgtagagacaaggttttgccacgttgcccaggctggtcttgaactctttggctcaagcaatcctcccrcctcagcttcccaaagtgctgggattacaggtgtgagccactgcrcctggcctcaagttttgacctggaatggtggtgtgacttagagttacaaataactcaagtcttttgactgtagccaagtgctttgtccatgactgcagacaatctctggtcccaaatgccagtggtaacctaccaggcttttaaaaaatgaccattagctcacgcctgtaatcccagcactttgggaggccgaggcgggcagatcacctgaggttgggagttcgagaccagcctgaccaacatggagaaaccctgtctccactaaaaatgcaaaattagctgggtgaggtggcgcatgcctttaattccagctactcgggaggctgaagcaggagaatcgcttgaacctgggaggcagaggttgcggtgagccaagatcgcaccattgcactccagcctgggcaacaagggccagacaccatctcaaaaaaaaaaaaaaaaaaaaaaaaaagaccatttcatggatcatactaaatatattaaaacaaagagttaaaagttactgctcagggttgtctttgaggttgaataagtttgacatttaaagggatttccctttaaagtcattgtttgactgcccaagtgatcttaatgacataatttgaagtcttctcccaggccccccagtgcatcctgtctctgctaattcctggccatcttgcagctgagtctgcagagtcatatttcagatactttattttccctgtcagcacacagcagccattatgggttcatttctrtaaaagcagagtgaattattcattagaacatcattacaagctttgcaatggaaaattattttcacttctgcatgtaatgaacttcgcaaagarccaacaaaaggagaaattttgcaggtataggaaagaaaagacaggaggtggttgtaggcatttattttcttgtcgtaatcaaataattcctctaataattgtctctgatagttactaaggaaatgcgtaagagcagaaactgagaatgtaggtcgtcaacatcagcgtgtcccagaaatccatttgcacagcaatgataaggatggttgacytgtctgggacctttattgctgtaggttcctgattttgcttaggaaggaggattccctggcctgggtctggatgaatcaaataggtctccttaaaccacccttctggccgggtgcagtggctcacacctgtaatcccagctctctgggaggccgaggctggctgatcacttgaggtcaggagtttgagaccaacctgaccaacatgatgaaaccccatctctaaatataaaaattatccaggcatggtgatgcaagcctggaatcccagctactggggaggctgaggcaggagaatcgcttgaacccrggaggccaaggttgcagtgagatgagatcgtgccactgcattccagcctgggtgatagaccaagactgtgactcaaaaaacaaaaacaaacacccttctgaataagcatacgaggcttaagatctttttttttttttttttttgagacaaagtctcgcactgtcacctgggctagagtgtagtggcatgatctcggctcactgcaacctccacctcctgggtttaagtgattctcgtgcctcagcctcctgagtagctgagattacaggtgcccaccaccatgcccagctaattttttgtatttttagtagagacggggtttcgccgtgttggccaggctggtctcraactcctgacctcgtgattcactcacctctgcctcctaaagtgctgggattacaggcatgagccaccgtgcccagcccaggcttaagatcttctatgtgaaggtttccctgaaagtgactccacctgtgccccactctggccagagctccacagtcactaacaccccttggcttctctctcctttcagaatccgggaattgacatcggtgatgtmtccgaaagaagagcattaaggaaaagtttaaagtgtaagaatttccagtggtacctggaycatgtttacccagaaatgagaagatacaataataccgttgcttacggggaggtaattcagaccgtgcatgcttttggcttggaatgctgttcaatatgctgtgggttgcttcgctggggagaaatagagttgctcattcattcattcartgagtggtttttggaggtgctggccctgatagcaagattctctctagctggggggttggggtagggaacaaatgtgatgaatgttacaatggactatggataaaagactatgatagtctactttgcctgagatatgtagcagataatgaatcctgtttgggaaattttgactttgaggtcctctgggacctgtaaatggagatattgagcaggaagtttggatgtaacgagaggcaggagggttggagtcctccattgctctgtgctgtgggctggaatcacttatcaaagaaaggaggaaacgttctcagattgtctatggtgtgatcatatcacctttctaaacctgaaagcaaagcgatttttctcttattacaaataccatcaatatgcatttgagaacattttggaaataataatactagggatgaatatttgagtgcttttgaagtactgggcactattctaagtgctttttgcatacaaattaatttcaccttcaccttatgagagattagcgttatttctgttttcttgataagaaaactgcaacttagagaaattatctaacttacctaaggtcacagagcgtgtaagtcacaaagccaaggttggacttggggatctggataccagagataacgtgtacactttgatgtgtgggcctccggactgtgtgtgtgtgtgtgtgtgtgtgygcrtgtgtgtgtgtgcatgtgtgtgtatatgtgtgcatgtgtatatacccatgtattttttttactaaaaccattccattcacaatgcctaataatttgaaattttactcaataatatggaggatatataagtgtatcatgaaatattttttgtcagtaattaatggccgcacatggttccactttttgtgtaagctgggctttgcttgagaacatagacactggtgtcttttccaattttaaaatatcacaagtaccattgctgagaacatcttcatatagaaacactcatgcatccacctcattctcccttgtgatgcctgtttgagatggaatcggtgacacacagtcaggccaaggagcagagagccaggtgctctcaatttggctgagacaccccattagctctgcaatcgggttttctttcctgggactccctgtgactaccaggttaaagctaagaagaatccctttgacttaggagtatttacatttttctacaactgtggattttcctattctttgcctgctgccttttatagaaaataaatcaaccacaggttaagtcatcagggtgtagagtggtgaccctcctgagctggaatttggaatgggatgctcacatcttgcaagggcagtctctagggcggttagggatacatgaagactagagccagcctgctgggttcaaatcctagtaggctgttaccagctgtgtgggtctgcttggcagccattccctcatctataaaatgggaggaaggagagtatctcctctacaggattcctgggaggataaaatgagctgtgatgtgtgaagttcttagaacggtacctggcatggccaagcaccrtggctcacgcctgtaatcccagcactttgggaggccaaggcgggtgatcacttgaagtcaggagttcaagaccagcctggccaacatggggaagtcctgtctatatagatatatatattaaaaaactagctgagcgtggtggctggtgcaggtaatcccagctactcggggctgaggcaggagaattgcttgaacccgataggcagaagttgcagtgagctgakatcgcgccactgcactccagcctgggtgatagagtgagactctgtctcaaaaaaaaaaaaaaaaaaaaaatggtacctggcacacaacagtaattattaatagatctgaactgccttgccttttcttctccaaaataaaagcatgaattttttaaaattatcaaagtaagattaaatataaaggaagaatcaaacaatgggcagtgaatggattattcctaagacaataagacaattggctcaattgcctagctttttggaaaataaatcaatttagattcttacagctcaccatttaccaaagtagatttcagatgaactgtagcattacatgaaagaaataataaaagaaccatgaggaaatagtgatgaatctgatctctgaatgaggaagggctttctaagaatgaaatccacgcaagaaatgcaaaggaaatgtgtcatggatccaagctcataaatwttaaaataatctgtacatcaactgagtagagaaataatacaccaaactgaaaatacatataccacaaatgctatagatgaacaaataccattaatatataataagctttgcaagttaagttaatttttttcttttttttgaaacagtcacccaggctagggtgcagaggcacaatcttggcttactgcaacctccatctcctgggttttagcaattctcctgtctcagcctcccgagtagctgggattacaggcacacgccaccacgcccagctaatttttgtgtttttgtagcaacgaggttttgccatgttggccaggctgstcttgaactcctgacctcaagtgatccactcgcctcagcctcccaaagtactggggttacaggcgtgattttaaaaatttgatttaaacaacaaaataaaacatcctcaaagaaaaataaacaaagtacaaggtcagttacacaagaaaaaatacacatggatgaaaaacacatgacaattttaaatttatttcatagtcaaagaaaataaaaaattaaatacacagaggtgtttttttyccccctatcygcaaatgaacaaagattcattttttgtgttgatactttacaggcaaggccttagtaatatgaaaaaaatcatatcttctgtgagtgcaaattgaaacaagccttttaaaaagcaatttgagccacatgtattaaaaagcttgataatgacagtcatagtttcttctccactcatatcccaagcaaataatctgaaataaggacaaagatttgagagtaaaattgttcagctcagacatgttatttttgaggaaatttttttttaatttaacttggagattagttgaatgtaatgcattcatggttggggatattttatagctgttataaatggtgcgtacaaaagtttaatgacatgagaaaaatattgataccataatgcttaagaggaaaaaactcaggatgataaaactgaaatcgctgctattttagattggaagcaagtgtgataatagcattgggaaatggagaagatacttataattaccttgggtagtaagtaggactttgggcagttttgcaagtgrgtactttgtcatgcttttccagctttcactaatgtcaggtgatactttcatcattagaagaaaaatagttactaaaaaggaaataataaacatgatgaccagcctgtgccccccaggctggagtgcagtggcacaatcttggctcactgtagccttgaactcctggactcaagctattctcccacctcagccttccargtagctgggactacaggtacatatcatcacatctggctaattttgtgtttttgtttttgtttttatagaggtctcactgttttgccaggctggccttgaagtcctgggctcaagcaattctcccacttccgcctcccgagtatctggggctataggcataaaccacttaggctagaaggctgccagagctgctgtgtacagctccaagtctgtgcactgcacaactccaggagctgcctttgacatcaaccacagtataaatgatgtcccttgagccgtacagtgggggtggcattgggggtgacattgtgatcatagtctgattatttggaagagagaagccttttgtttttacaaactttctttttaaaataataaaatcaatacatacattctatcggaaatataaagatgaaaactaaacttactccaaatcccaattcccagatataatcaatgttaacattttaaggcatctggttctattactccttttctacctgctgagtatcaccatttacagatatatatatttcagatggactatagtgttaaatgaaagaaaccaaattagtcaaaaaccaatttttaaatagctcttccttttwaaaaaaaaaaaaaagagatagggtcttgctctgttgcccaggctacagtacagtagcatgatcatgacatactatagccaagaactcctctgctcaagcaatcctcccacctcagcctccctagtagctgctaccacaggtgtgagccactgctgttggctctagacaactttttcttttttttgagacacagccttgctctgtcacccaagatggaatccagtggcgcaatctcagctcactgtagccttaaactcctagactgaagccaccctcccacctcagactcctgagtagctgggactacaaacacatgccaccatgcctagctaattttgtttattttttgtgaagktggggtctcactatgttgcccaggcttgtctcacactcctgaccttaagcaatcttccagcctcagcctcccaaagcactgggattacaggcgtgagccaccgcacccagcccacatatgcttttaacgcttagggaaggagtcatctcctcttagcagttatctctgaatcctcggaaggggtaaagaagttctccttggccagttgcagtggttcacgcctgtatttccagcactttgggaggccgaggcaggtggatcacgaggtcaggagatggagaccatcctggccaatatggtgaaaccctgtctctactaaaaatacaaaaattagctgggtgtggtggcgcgtgcctgtaatcccagctactcagaaggctgaggcacgagaatcacttgaacccaggaggtggaggttgcagtgagccgagattgcgccactgcaytccagcctggtgacagagcaagactccgtctcaaaaataaaaaataaaaaagaagctctccttgttggccctagcatatttcaaacattgcagtagaccgtggactactttagggcagggactatgttatttatcttttgctcattaaatttagcacagtgccaggcacttaccaggccttcaataaatatttattaaattactgaatgatagatttgattgcagaaacattagaacaaagtttaaaagcctggcagcctcaaatcatgacgtaaagcaaatattctgttaaaacattcatgtccttaatatgtaaagagctcttggccaggcacagtggttcacacctataatcccagcagtttgggaggctgaggtgggaggattgcttgaggccaggagatggaggctgcagtgagctatgattgcacccctgcactccagcctggagtacagagcaagaccctgtcactcaaagaaaaagaaagaatttaaaaatctgctcgagttgtctgagcctaaacacaatttgggtacataaagaacaaaatgccagccaggcgcagtggttcacacctataatcccagcactttgggaggscaaggcaggtggatcacctgargtcaggagttcgagatcagcctggccaacgtggtgaaacgccatctctgctaaaaatacaaaaaattaactgggcgtggtagcgggcgactgtaatcccagctactcgggaggctgaagcaggagtatcgcttgaacccaggaggtggaggttgcagtgagtcgagatcgcgccattgcatttcagcctgggcaacaagagcgaaactctgtcccaaaaaaagaaaagaaragaaaaagaacaaaatgccttttcctctctttgtttccatggagaatataacctggaggggaatgaatatagatggaaaggaccagcaacatgacctttttcccactcattgagaccctagggtggtggtgggatggatacccrtatagatcacagtgcacccagagatccaaattagatcagttctcacatgctcccaaagacccatgcctagtttcacgggtgttgctttggggacttttgtctatttcctccgtgggtgcattccaaacaccaaacacctacaatggtgcttagtacagcataggtatcagtaaatgtttttgaatatataaatagatactgctagagcattttatgatagtaagcttttaggttttttttttcttttttttttagaaataggtcttgctctgtcgcccaggctggagtgaagtggtgcaatcatagctcactgcagcctggaactcctgggctcaagcgatcctcccgtctcagcctcctgaatagctgggactacaagtgtttgctaccatggctggttaatttgttttaatgtttttttaggatggggcctcgctatgttgcccatattggtcttgaactcctgggatcaagcgatcctcctgcctcccaaagtgctgggattacaggcgtgagccaccgcrtccagcctaatttgcttttaggctcttcatgcctttatgcaaataatgacctgagaagctaacctctgattacccagtttattaaaaccaatgtcggtgctgaggcccacttacaagcctaaccatctggataactggattttacaagccacttagaagacttagaagccactgagaagcttagaagccacttagaagcttcaaagcygtttagaagtctaagatcggggtaaccagtgctcctgtatgcagaagttccctgagattgcctttcatgttaggaatggaggtgctgtgagggtgggggggcaagctgcccaggacacagtcagagacctagcatccatgccatccaccttaagacttgatctttcttgttaaggtgatcaccgcaaagatttgagccctggtcctcacttagaggcycgtgttgtcttcccatcatgaagttggaaccaagccatggtagaacagtgactcggcatccacacctccactagctgagctctcatgggtcgtgttttgtctattcttgcagcttcgcaacaacaaggcaaaagaygtctgcttggaccaggggccgctggagaaccacacagcaatattgtatccgtgccatggctggggaccacaggtaggagctcgtctctgaccrggaaggaagtaatatcaccatctccgacccacagaggccttgcaggccttctggataaactttgttgctgtctaccttggtagttatttattctgagaaaaatttttaagaagaaggtaggmgtctttctggttatttctgtaaagaagctagggaaaaaattcataagtggttgttgcagcatgcagattttttttttttttttgagatggcgtctcactctgtcctccaggctggagtgcagtggtatgatctcggctcactgcaacctccgcctcccaggctcatgtgattctcctgcctcagcctccagagtagctgggactacatgcgcccgccactgcgcccagctaatttttttgtatttttagtagagacggggtttcaccgtgtcagccaggatggtctycatctcctgaccttgtgatccgcccgcctcggcctcccaaagtgctgggattacaggcrtgagccaccgtgcccggccaaggctcacaggtttttctctgtgtgtagtggttttgcattcccccgaggtcagctgtgtaccctctgccacatcactgccggtagttctcaatgtccagatggatactcacccttcctcctaaggtgggtgagcaatgccagacaggttactgttcaaatcctcagccctttgaccttgcagcaactctgggaagtaggcaggcagcatgaggaaactgaggcacagaggggcaagtgcctgtgagcaaagcaacctagaacccaggctttccagcacagccaagcattttatactatttatttatttatttatctgtttatttttttagactgagtctttctctgtcacccaaactggaatgcagtgccacaatctcagctcagtgcaacctccgccttctgggttcaagcgattctcctgcctcagcctcctgagtagctgagattacaggcttgcaccaccctgccccagctaatttttgtattttcagtagagacggggtttcaccatgttggccagactggtctcraactcctgacatcaagtgatccaccacctcggcctcccaaagtgctgggattacaggtgtgagcttccgccctgggccaagcacagccaagcattttaaagtcaaattatcacctgaggtcaggagttcgagaccagcctggacaacatggcaaaaccccgtctctgttggccaggtgcggtggctcacgcctgtaatcccagtgctatgggaggctgaggtgggcagatcatgaggtcaggagatcgagaccatcctggctaacacggtgaaaccgtctctactaaaaatacaaaaaattagctgggcgtggtggtgggcgcctgtagtcccagctactcgggaggctgaggcaggagaatagcatgaacccaggaggtggagcttgcagtgagccaagatcgcaacactgcactccagcctgtgcgacagagtgagactctgtctcaaaaaaaaaaaaattagccaggcatagtggcgggtgcctgtaatcccagctactggagaggctgaggcaggagaatcacttgaacctgggaggtggagtttcagtgagctgagatcgtgccaccgcactagagcctgggcgacagagcgagactccatctcaaaaaaaaaaaaaaaaaagtcaaatgcgatccatttaaatccaagttatttatggagcaccatcaccatctacgattggtgaaaagtgcctgtggggagyaggagattggctgggaagcctagaccttctcctctccctgaaggttctctgtagggaaatggggatgcacatggaaagcaatatgagctacagaatctaatgcaggtggctgtgatggctgaggcgggaggattgcttgaggccaggagattgagaccagcctgggtaacataacaagacccccgcctctacaaaaaatacataaaatgagttgggcgtggtggcacacgactcaggaagctgaggtgaggggatcacttgaacccaggacttcaaggctgcagtgagccatgatcatgccactgcactcctgggtgacagagtgagaccttgtctcttaaaaaaagaaaaaaataagtgcacgtcttcattcattcattcactcaactaatatgtcttgattacctattctaaaatgctaggcaccactgtaacacaggcagctggtatgatgcagtctttgctcccaaatcgtttacccttgaaggggagggactagaaaagaggcaagaaatctacagtagaataagcgtaacccacggtgctggggcctgggaggtgggaggtagcccagtttggccggaactttgaatgcaagagggaagggagtgctgagagagaaggcagcagagaggtggagagcagatggtgagagacctaaggaggcctgcaccaagactccagcctgcacgctgcagtgggcagcagaatcgtccccaaggctgcgacaacaccagctcctgggccccatccccagagtttttgggtcagatctccggtggggtctgagagtttgcttttgttttctccttccttcctttttttctttttccctccctccctctctctcttcctccctccctctctcccttcctcccttccttccttcctttccttccttcctccctcyctccctccytccttcctttcttcctttccttttgtttcctttccyttcctttctttcttttcccttccttccttccttcctttcttccttccttccttccccccttcctttctycctttcctttccttttttctttccttccttccttccttttcttccttccttccttcattttcttctttctttttttaagagatagggtcttgctgtgttacccaggctggagtgcaatggtgtgatcacagctcactgcagcctcagcctcctgggcttaagtgctcctcctgcctcagcctccttagtagctgggactaaaggcagatgccaccatgttccactcaattttccatttttttgtagacatagagtcttgctgtgttgcctgggcttgtcttggactcctggcctcaagggatcctcccaccttggcctcccagagtgctgggattacaggcgtgagcctcagcacccagccccagttttgcatttccagctgatttctaggtgatgctgatgcygctggtttgaggaaatgggacttgatccagaggatgtcagggagccactggaaggctcacctgggggtgggagaggtgatatgtttagactgcctacagcagttccagcagggactaagaagctatgtcttggaayagaccaaatgaaaagcccyagctagtctcgggctgagatggccaagagttggatatagcaacttgtggtactgagcctagaggacttgaagaaaggggacatagagggtgggaggcagggcccagcacactccccacaccaccttcctaggatacccacagcctctggcccaggcagcaagatcccagaggctgagcctagggcagtcccactcctgggccccatggctgtgccggatcatccttttaggcaattactccaagagtagctgtgaaaagagcacttaactcccagacttctttgttcaatcttctgaataagtcacatttgaatggcgcacttattaacggtgacatagtagaggctatcccagttagatactggcataatcmaaaactgctccaaggacgtccacttgtcctatgaatgtggaacaaagtaaagatggtctgatcccatagcttccccatgtggctctaagcagttacattttgctttgggtgtttcaggggaaggttttgtttttgtttttgttttgtttttrtttgtttgtttgttttgttttcagacagagtctcgctctgtcacccaggctggagtgcaatggcgcgatctcgggtcactgcaacctccgcctcctgggttcaggcgattctcctgcctcagccttatgagtagttgggattacaggcrcccaccaccatrcccagctaatttttgtattttcagtagtgatggtgtttcgccaygttggtcaggctggtctcaaactcccgacctcaggtgatccaccsaccttggcctcgcaaagtgctgggattacaggcaagagccactgcgcccggcctcaggggaaggtttttaaagcyactcaggaagcacgtgggtgaacctgagggctgggatgtgaaggcggcagtgtctgccttctgtggccctgtgccccccaccctccccagcatctttaacacctttgtgatgcctacacctccagacatagtctggggcagactgctgtgaacttgaccttccttacctttctgtctggagcctttattcctctatagcccctccctcaagcttctgcccagtgggaacctgatagaccagcaggaatgcctggatggcataatttcaggacaacatggtcagaacttttctttcttttcttttctctttttagagacaaggtcttgctctgtcacccatagctstgcaatcatagctcactgcagccttgacctcctaggctcaagaaatcctcccatctcggcctctcaagtagctgggattacaggcatgaatcaccatgcccagctaatttttttaaaaaagttttttgtagaaataggggtctccctatgcttcccaggctggtgtagaagtcctgacctctggaactcctgatctcaggcaattttctcacctccgcctcccaaagtgctgaggctacaggtgtgagcccctgtgcttgagcctgtggttaaaatttaatgagggctttcactctgaaggtgaccaccttctgactccctccccaggcaggaggcagacatcaagtctcctttccygctgggagcttagtggcactcccagcacagtgtggcccctttgttaggaaatggctgggtttcatctttcccagttccacctgcgtgcggaacttttccaagtgaaagctcctgccatggagctgattagattgagttgatttagaacggcaaaccrgattaggctgctcatggctcccccggctctgggatggacgcttgttaagtgggccccggctgctttccgtcagctgctttttaaaaagtcaatctcatgttgctttctgttcagccacgtgtcctgaattagagaacgcttggtgtggctctccagctgccaggcggtccctctactcactcatcaaagctcccccacttcccaaacccactccttctgtgcaaggagtcctgtcacccaactggaatccttctaaactgcttcccaaaatgccatgggtgcaaacagtggcagaatcagagctcctgtaaccaggcggctctcagcagaaggaattggtgctccacggacatcgctagcttaattaatggactctatgttgtaatttattatcaaacagcaattaaacagagataaaataggcactgaggagggtartttcctgtcttgcagcatgtgtttgtcaacaagatgttccgggccactcagagagccttgcttgctcggaaatgtctgtcgccttggttktggctgattactaattagaattagacaaacatccgcttctttttggaagcctgagttttatttaaaaatagaatgtcaaggctgggcgcactggctcacgcttgtaatcccarcactttgggaggccaaggcgggtggatcacttccagtcaggagtttgagaccagcctggccaacatgatgaaacctcgtctctactaaaaatacaaaaattagccaggtgtggtggtgggygyctgtaatcccagctactccgggaggctgaggcaggagaatcacttgaactcaggaggcggaggttgcagtgagctgagaccatgccactgcactccagcctgggcaacagagcaacactctgtctcaaaaaaaaaaaaaaaaacaaaagaaaccatcaaggatgcagtagcagccttagtgttggcttgaacctatttggaacagaagttcttgtctaaggagacccacagacccccagttctaccaggctgttgccctcctgcacccaggcccagggtgggtccccaagctagagcaaccacagtgaaaccagaacactttggctaccctgcacggagagcaccctcctctgccaggcccttcttgctacaccgctccagacagctggtcaaccttctccagccacagcttctgatttctccagaaaggcaaaggtgctatcaggaagaaagagggggctaggggtagtgctgaccccagggacccactgtggcatctttctcagccctgaacgcccccgatggctctgcatctgctctctcaggtccctacagctgacccgcagcccagggtttgaacagtgcggcatacaatggactctggccccatagccgcgtgttccagcccctgcctagggacagctctgaacactctgggtcagggctgggctgtgttaaagaacaaaaatgctgacaataagacccatatctgtttttggtgacatgtttaatccttccaactactctgtctggtaaatagtaacctcctcccatcyccccgactttattttttatttgagatagggtcttgttctgtcatctaggctggagtacagtggtgcaatcatagctcgctgcagcctcaaactcctgggttcaagcaaccctcctgcttcagcttccagagtaactgggactactggttatgaaccaccacacccagctaatttttcagtttttttgtaaagatggggtctcactatgttgcccaagttggtctggaactcccaacctcaagctgtcctcccaccttggcctcccagagtgctagtattttggatgtgagccaccttgcctggcaccacctgcttttttatattattattattaatgagaacatggagattcagatagggcaatgccagctgtcaaacgaatgtcccatatcatttggtcttgggtactctgrtctgcatctggtgaattctggagagcacctcatatccttgagtccttcrgtgttctccaggccacagcaaaacacagtggaaagactcataggaagcagagaggaatggaacatgaaagcccaggtgcagaggctggaatcacgaggcacatttcaggaaataatcacacagttggcagaagcaggtggttcagggtggcccaaaagggacagagtatggagatcctccggtgctaggatcaagggctagggcttccactcagcatctcaggtgtggtccactgacccagtgaaccctctggggacttattgtaaccgcctcttccaaagtccaacccccgacctagtggaggtggggcctaggattccacatcgtaacaagcattggcaggtgcttttctttgtcaatccacaactatttattgagcatctattttgagaacttgtttgggggttctagcaggggagtgcagatactcgtatacccttgaccaaagactggtcttcctctattggggatggtcatcctctttgaccaagcatgcagtttcaggagggatgcacgtggaggggtgagggagaaaggggacacccgtctagccagccagatcagctgaatcaaccctggcgatcaatgggatgacagawgttgcagccagatcaccctcacatccaagtgagcatctatttaggataatgctgtgaattaggccatataggtggtgatcatatgtccctatctgcccaggacagacsctgtttaggcctagtgtcccagcttgattttttgtttttaatttataacactatcttagttttttatataattgaggttcttgggttttttttttttttcttttcaaggcaattactatttttttttttttttttttttgagacagagtctcactctgtcacccaggctggagtgcagtggtgcgatcttggctcactgcaacctccgyctcctgcgttcaagcgatyctcctgcctcagcctcccgagtagctgggattacaggcacctgccaccacacctggttaatttttatatttttagtagagatggggtttcaccatgttagccaggctggtcttcaacttctgacctcaggtgatccgcctkcctaggcctcccaaagttctggaattacaggcgtaagccacggcgcccagcctgtttactctttataatgtataattttgcaggttttagcaagcacatgtgatcaagtaatcacaccataatcaagatacagagcagttcaatattcccctgaacctctgcccacatatactttttaaaaagatttattttgttagagacagcatctcactctgtcacccaggctggagcacagtggtgccaccagagctcactgtgrccttgaactcctgggctcaagcaatcctgctgccttagcctcctgagtagctgggattacagtcacacaccaccataccrggcttttttatttttttttttaaatttttgtagagatagggatctcactatgttgcccaggctggtcccaaactcctgggctcaagtgatccgcccaccgctgcctcccaaagtgctgggatgataggtataagccagtgcgcccagccttccacatacttttatacacatcacaatcacttttgaggaccatagttgagagagtgttcatagaagttgcctgtacacctgcacatgttcaaacctaacacgttcctgcaaattctgatgcagctttgtccccgagctgagactcactgcccctccacagcccataccatggacgaggtgtgactaacagggtctgcaagaaatggccctggagatttcgacgggcactctttgaaacagctactggctgtaatgagatgttcgtaagatgaggtgtgcactgtgggaaggaattgagggtgggagtccctcttggaaggtgtcaagctctgttcccaggacctttctgattcagtaggctcaggggaggacattagcgcccaggacctttctgattcagtaggctcaggggaggacattagcgacgtctcctctgtgtgtcctccctgttaatacattttcctcctcttctccgtcctttccgagagactcaacgtttcttctctcagttaattcatcaccaaaatgacagatgagattcttttatcctgtaattaaattcaatctgatcttggactcattctctgatggcttcatcttttaagcgatacatcatccaaacaccttgtcattatgatgcattgtgccaataaggcacccgtgccctgctggcgtgacggggctctggcgagctattagcatgtaggaggcacccctggtcgtcgtcggaaaacacagaagtgagtgacacccagcagcctcttggcttccagatgctatcatgtaagtgtcggagctcaggcaacgcagcctttgagaacacattgaagtttcgcccaagaaaagatggctttggtccagaaaacaggcctgaggttctgggaatatgcctctcccatttgataagaagcaaacttgatcatccctttccatccacgaaaacccarttcctagaaatcaccatgggggtcaaatcaggggatctgtagaccttctggaaaacagagttgggggactgaaggcagatactttttaaaaatttttttattaattaactatatatttcatgacaaggtcttgctctgtcacccagsctggagtgcggtggtgcagtcagctcactgcaacctcaatctcccagactacaggtgcacaccaccatgcctagctaatttttttgtgttatttgtacagatggggtcttgctgtgttgcccaagctggtctcaaactcctaggctcgagtgattctcccccctcagcctcccaaagtgctgggattacaagtatgagccactgcacctgacccagatacttttgatgctgagaaaacctgctgcacacacaaatgggagatgaaacagaaaataggagaggaaatgctgatggtgttctatgtatctgaaattcgacaccacagaggttctgaaccacttattttcattttccattttcaatctcttatgccatattttttaaaacctctccttttgcattccaatgyaacacttataaattcgtcttacctcgttgcaygcagatagtgagaatattaacagccttttttgttgttgctgttgctcttctgactcgtcttctctcaaaatattcaaaatgtttctgattttattactttgggttgttmgttcctgcctcctgggccctgcgtccatcagcctgtgtgtacactccttgcagccacyctctttgcagacctccatgcaatgcagttttacatgctttctgcttgctgagattttccccgaggctttgggggacccaggcctctttctctgccatctgctttgcttctcttttctatttccaactcccaattccgtttttctaattatccctgagaagtggytctcgtgatccacgtgcagagcacaggaaggcttgagttcctaaatatttcctgctgatgtatcacctaagtttatgaaatattccaaatattctgttgtgtcctttcaacaatattcacaacatcttcatcaggagtagattcctcctcaagagaccactgtctttgcttatccattaagaaacaactctatatctgttcctgtttgatcataagattgtagcaattccatgccatcagtgtgcagaagtaaagacacatgtacaggcatacctcatttcatagcgtttcactttatggtactttgtagatgttgcattttttcacagatcgaagggttgtggcaacgtgacatcgagcaagtctatgggtgccgtttttccaacagcacctgctcacttcctgtcgctgtgtcacattttggtaattcttgcaatatttcaaactttttcattagtattgtatctgttatggtggtttgtgatcagtatctttgatgttactattgtaattattcggggcactatgagctgcaccyagacaggaccgcgaacgtaaatcataaatgttgtgtgtgtttgacggctccactgttgggccattctcctatctctctcccaattctcgggcctttctattccccgagacacagcaatattgaaattcagccaattaacagccctataatggcctctaaaagctttagtgaggaagacaagtcacaagccaaataaggctgaaagctaggcctcttgtgccaaataatttgccaagttatgaatgcaaaggaaaagttattgaaggaaattaaacatgctactccagtgaacacacgaatgctaagaaagcaaaacagcctcattgttcatagggagtcagttttagtggtatggttagaagaccartccagccacaacattcccttaagccaaaagcctaatccagaacaagggcctagttctcttcaattctatgaaggctgaaagaagtgaggaagctacagaagaaaagtttgaaggtagcagaggttggcttgaggtttaaggaaagaagctgtctctgcaacataatggtgcagggtgaagcagcaagtgctgatggagaagctgcagcaagttctccagaagatctagctaaactcrttgctgaaggtgtctacactcaacaacagattttcaacgtagacagaacagccttctattagaagaaggtgctatctaggactttcccacatagagaggagaagtccatgcctggcttcaaagcctcaaaggacagcctgactctcctgtgagaggcgaatgcagctggtgactttaagttgaagctaaagctcatttaccattttgaagatcctagggcccttaagaatgatgctaaatctactctgcatgtgcccgagaaatggaacaacagagcttggatatcagtgcatctgtttacagcatggtttactgaatatctttttttttttttttcttttttttgagacggagtctcactctgtcaccaggctggagtgcagtggcgcaatctcggctcactgcaatctccgactcctgggttcaggcgagtctcccgcctcagcctcccgagtagctgggactacaggtgcgcaccatcacgcccagctaatttttctatttttagtagagacagggtttccaccatgttggccaggatggtctcgatctcttgacttcaagatccrcccttcttggcctcccaaagtgttgggattacaggcgtgagccacaacgcctggccggtttgctgattatattaagcccactgtccagtcccacttctcagaaaaaaaaaaaaaagattcctttcacaatatcactgctyattgataatggtcacctaggagctctgatggatacgtaccaaaagatgaatgttgttctcatgcctgataacacatcatccattctgcagcccayggatcaaggagtaattttgaccttcaagtcttatttaagaaattcattttgtaagactgtagctgccatagatagtgattcttctcatgggtctggccaaagtccatggaaagctttttgggaagaatgtaccattttagataccagtaagcatgtttgtgattcatggaagaccaaaatagcaacatgaacaggagtgtggaagaagtggattccaaccctcatggatgactttgagggtttcaaggcttcagtggaggaaggaactccagatgtggtggaaacagcaagagaactagaaccaaaatggagcccgtagatgggactgaattgctgcaatctcatgatcaaacatgaacaaagagttgtttcttcacggataagcaaagacagtggtctcttgagatggaatctactcctgatggggatgttgtgaatattgttgaaatgacacaagagaatatttagaatattccataaacttaggtggtrtatcagcagcaggatttgagaggattggctccaattttgaaagaaattctactgtgggtaaaaygctactaaccagcattggatgctacagcgaaatatttcatggaagggagagagtcaattaatgcagcaaactttgttattctcttattttaagaaattgccacagccgccccaacattcagcaaccaccaccccgccaccctgatcagtcagcagccataacatcaagccgtgaccctccattagcaaaaagattacagcttactgaaggctcagatgatcactagtatttttagccatgaagtatttttaaattaagctatgcacatttttaaaaggcatgctattgcacacttaatagtctacagtatagtgtaaacataactttttatgcactgggaaaccaatatatttgtgtgacttgcctttttattgcaatattcgctatattgcagtggtctgcaactgaacctgcaatatctcaagatatgcctgtatttgattttgcctaaggaagactcagggttaaggaggaattactgtactatttctttcctgccagaatggattgatgagctattctttccaggaaatcacaatgacagacataaattgttttccagtggagattgtgagttgagacttttgtgtcttccgggaagtttagctgacttttctccaggcacaaaaagtcattcaggcaggttttgtgctcatgttaggcttggaataaggaactcagattgaacaatagagtggtagccatgtcaccagctgagcctttctcccttgcccagggatattaaattccacagccaaataagtgaaagtcacttctgctcctctttttttawtcttttctttctttctktcctttctttccttcctttcttccttccttcctttctctctttctctctttctttttttctttttttgaaagagtctgtttctgtcacccakgctggagtgcagtgccayaatcagagctcactgtagccgcgacctcctggattcaagcaatcctcccacctctgcctcccaagtagctggaccacagccacacaccaccatgcttggctaatttttaagttttttatagagatggggtctcgctatgttgccttgctgtgttgaccaagctggtctcaaactcctggcctcccgcaatcttcctgcctcagcttcccaaagtgctgggatttataggtgtgagtcagtgtgcctggcccttcttttttactgaaggcacaatagcatttcagagagtttgaaaaacacaaatttaaatcatccatggtcctgccaccctacaacaactattattattactgaaggttactttcagcttttctttttttcaaagaaatatattgatttgttaggctgtctttatatcactgaattaaaaaggaaacaacgtcactgtttctgaaggacaaggagggggacgtaaagcctcctggtggaatgtatttagtgccttactctttactctttagctaggaggctcagcagagcgatgcagaacttcacagtagcctcatccctgactgcttgattcacagagctttgatttctccttgggacagtagtatctgttgaatgattattttcagtaagttcatagtgagatatgtacacacacatacacatacacataaaacaagctacataaacaattttattatacatacacaatgtatgtatataagtactttttaatttttttatttttattctattttttttttttatttttgagaaggaatctcactctggcacccaggctggagtgcagtggcgtgatctcagctcactgcaacctccacctcccaggttcaagtgattcttctgcctcagcctccagagtaactgggattacaggtgcccgccaccacactcagctaatttttgwatttttagtagagatggggtttcatcatcttggccaggctggtctcaaactcctgacctcaagtgatccgcccacctcggcctcccaaagtgcatgagccaccgcacccagccataagtacatatttgttatagtatatacttagatagataactatatactagtgttagtattcagtgaaagtggatcatcataaagttcttcatccttgttgtcttcacatactataagtatataagtatatatttaastatatactataatataaatagtgtgtgtgtatatagtgtgtgtatatatatctacaatacatgtatacatatatacacatatatatacacacacacatacacacacacacacacacacacacacacacacacacacacacacacatatatatatatggagacaagaccaaaacaatgcaatgtgagatccygggttggatcctgggaagaaaatccatgtttgtggttttgatttgcatgtcccttcaatgatagactggattaaaaaaatgtggtgcatatacatcatggaatactttatagacataaaaaagaatggaatcttgtcctttgcagggacatggatggagcttgaggccattatccttagcaaagtaacacagaaacagaaaaccaaataacttctctcttataagtaggatctgaattatgagaacacgtggacacatagaagggaataacamacactggggcctattggagggtagggggtggagggtggtaggagggaggggatcaggaaaaatattaaatagctaatgggtactaggcttaatacctgggtgatgaaataagctgtacaacaaacccccatgacacaagtttacctgtgtaacaaacctgcatatgtacccctgcactttaaaaaaagttaaaaaaaaaaaaaaagaatctataggaaagaaaacaagttctttgtaaagctggagcaagaccccagttattcaatggtgggtgaggtcggggaagctaatatccacatttgcttctcattattttatttaatccgttattttattagtctgttttcatgctgctgatraagtcgtacctgagactgggcaatttacaaaacaaggaggtttaatggactcacagttccacgtggctggggaggcctcacaatcacggtggaaggtgaaagtgatgtcttccctggtggcagacaagagaagagaacttgtgcagggaaactcccctttataaaaccatcagaycttgtgagacttattcactatctcaagaatagcacaggaaagacccacctccatgtttcaattacctcccacttggtcyctcccacaaaacattagaattgtgggagctacaattccagatgagatttgggtggggacagagtcaaaccgtatcaatctccataaatgcactatgatgtaatctataattatcccaattttttttttttttttttgagatggagtctcactctgtcactcaggctgaagtgcagttgcacaatctcggctcactgcaacctctgccactcaggtttaagcaattctcctgctgcagcctctgccacccagattcaagcaattctcctgcctcagcctcccaagtagctgtgattacagatgtgcaccaccacgttcagttaatgttcrtatttttagtagagacggggtttcaccatgttggccaggctggtctcaaacttctgacctcaagtgattcgcccgcctcggcctcctaaagtgctgggattacaggcgtgagccacggtgcccagccattatccccattttaaaaaatraggaagcagagtcccatagggctaaagtaattggcccagggccataaaatcattaagtagcagagcctggatttcttaagcaggccccagagtccaagtccttaaccattatactcctgtctctctaatgacacagcaaggtcagaaatgctgctgtagttggcaagcgaagaaagtgagctggttgagccgtggtacagaaagccagtgcttgctagcacgtccacactgaaccaggatacagccctcccttcccatttcacatatagagacaaaaaagaaattcatgtcatcagcggtctgtcctactgagaaataaagtctttacttccttaaccaattcagcagtcaaaggtgtgctttgaagatgtgcttaggaatattctcctgattccctagaagtcggagtggactacgcattccctctctcacccagctcttccagctctcatcctggtgccccacaccaagagaggccccaggtctctccacaggtcatgtgggccagaccctgcctccatcagaactgccccaatctatccgctcctagaactgtctctgcaagaaaatcagcctgaggtttttgtggcacaaagatgtatccccattcattccaagtagcaaatgcattttctggaaacatagtgcttgaatccagcatgatgagtcatatggcagaagggagaagccagcagaggaagggcccttgggaccatcccagcccccaggagctggccctctctgcaggaaccatctggttccatagcatgctttctaagctcccatatatatttttaaatcaactatatggaagcgtaaggtaaataaatacactgcatctatttaaagtgtgcaatctgatgagttttgccaggtgtgtgcacctgtgaaggggctcttgaaatcaagattcagaacatttccatctccctcaaggatttctcatgctccttttctaaccccagctctcaggcagccaccacttgcccactgtgagacatttattttctatattcagtttgggattgggcatttggaattttccaaaggcagcatcctctgtagatgtctacaggcccctggagacagagcatcttctcaggcctgtatcctccatgcctgggactgggtccttgctctcaggacagcctagaggggctcctgtcccctgctgggctgcctctttctttgcttggcccagcttcccaaacacccaggataataaaggagaaactctgtcaatttcaataatatacacatgtacttgccagtcataagaaaccattcttctgggctttaaccaagcaataaataaatgtactccaaagcagatctgaattaatggaatatatctctctgtctcttgagtagaagctgggaaacctgaacttttcttttttggtgtttgttttagagataggatcttgctctgtcacctaggctggaatgcagtggtgcagtcatagttcactgcagccttaagttcctgggctcaattgatcctcctgcctcagcctcccgagtagctgggactacaagcatgtgccaccatgcccagctagwttatttttatagagacggtgtttcactatgttacccaggctggtcttgaactcctagcctcaagtgatcctcctgcctcaccctcccaaagtgctgggattacaggtgtgagcccctgtgcccagccaagaaacctacattttgcatttagccattgttttctacactgactgctggattttaaaatcaagagaaaggcctctaataggaaagcaattgcaagccatgtttttattgataatctgatggattttgctgtgttctggagtcattctgcaattatttatctggtttttgtttatctggctataacctgcgtattctagttttccttcaaggctgttaaatttgggttaatagttgtatgtgtctcttagatcatctcaaatggaaaattctttycccctaaatgagaattaattgtatttgagctcagagggttttttcccaatgcattagggtgtggataatgacgttcatttctcctcatgagcccaggagccaaatagagtaatcccattcacttccaaagacatttatagagcatttgatttttgcaagatacttttgttggtccttaatgctggataaaaatgggtataatgctgctaaaaataacactaagaaaaacctatagcaaagaaagacacatttataaaatacgagattatgtaagttggaagaatcatatctgggtgggggctatatggagccagtggagacagggtggggctagggagagaatatcctgcacatacagggaaggcaggctggacrgtcagctgttgttgagaaacctcatatcatctatcagactaagccagaaaagcaagagttacacctgaaaaggtaagtgggaccatagagtaaaaagtcatggtagaaagtttattcttaaattggtggaccatgagagcaatggaagattgaggcaaggaatggtatggttataacctgcaggactgggtagggtagatgggaactgtgagggtctggaggcaagagaaccagtgataaagatctgtctttatctgcatctgtctcagaatagtaagaatattcgggtctcagaatagtctggaattttgggaggaaatatttagaggcaggaatcggaggacatgcaaatttgtggatgaaaggatgagggaggggaagggtgcaaagttgattcaagtgcgcaagtctagaactaggggactctgggtgcgtaacagggagctaattgtctgttggctccacactgcaggaatgagagtcacaagtttcaggcagtcgtaaactcagagaataatgcattacccatccttctcctcccactagcaggattaccttggcaacagtgagcatcatcataccaaaatgatagatttcacagatagtggcttggccataatttggtgaatgagcatcacagtaatgaaatagctttcagtagtagagtacattagatactttgaagggtctccctgctctcatatagacagattttagataaactataacaaatattatttagattttttttctaggctcataagaaagtggttgtatcagccgggagtggtggctcatgcctataatcccagcactttgggaggcctagtcaggcagatcacctgaggtcaggagttcaagaccagcctggccaacatggcaaaamcctgtctctactaaaagtacaaacattagccaggcatggtggtgggcgcctgtaatcccagctactcaggaggctgaggcaggagaattgcttgaatctgggaggcagaggttacagcgagccatgatcacgccactgcactccagcctgcgcgacaagagcaagactctgtctcaaaaaaaaaaaaaaaaaagaaaagaaaagaaagaaagtggttgtatcagtgagcttttgctgcataacaaattatccccagacattttcagataaactaaatctgacagtgtgtctgtcctatgacagacagtcaccaaaggaacttctaaagaatgtactgtaggaaaaaggaaaatgactgcagaaggatgtcttgaggcaagaatgaattataagcaaagaaatttataaacacataaatctatgcaaacatttattgcataaaatcataagaataatgtctaatttggggaacaagggagatataaccaaaatactgaactattagaaggaagtgatcagatttggtatcctaatgtctttgaattttattgaggggaagcagatgttaagatattttataaaattagattttgcaaagttgtcactggttaaatttgaagagtaaacaataaaataatagaaatggagtgtgatttttaaatctgtagaggggaacaatgaaatctgataacatgtcaacaaatcaaccaaacgcaactaatccaagcaaaggcaagtagaggagaaagaaggaaacagaggagcctggacaaacagaaagcacaaagagagatggtagaaataagtacaaatatatcattaattacaatgaatatgaatggatttaactcttcagttaaaagacagagattgccaccttaaatttttaaaactccagctgtattccattttcaagagacacataaaaaacctcaggagagcgccgggcccagtggctcaygcctgtaatcccagcactttgagaggccgaggggggcagattgccagaactcaggagttcgagaccagcctgggcaacayggtgaaaccctgtctctactaaaatacaaaaaattagctgggcatggcagcgtgtgcctgtaatcccasctactcgggaggctgasgcaggagaattgcttgaaccagggaggtggaggttgtagtgagccaagatcatgccactgcacgccagcctaggcaacagagcaagactccatctcaaaaaaaaaaaaaaaaaaaaaaaatgaccaggtgcagtggctcacacctgtaatcccagcacttcttgaggccgaggccggtggatcacgaggtcaagatatcgataccattctggccaacatggtgaaaccccgtctctactacaagtacaaaaattagcctggcatggtggtgcacctgtagtcccagctactccggagtctgaggcaggagaatcgcttgaacctgggaggcagaggttgcagtgagccgagattgcgccactgcgctccagcctgggtgacagagtgagactctgtctcaaaaaaaaaaaaaacccraaaaacaaaaaaaaaaccctcaggagagtgaaatgttgaattaaaaagatggaaagggttatgtcaggcaaattctaaagagcagaaagctggggtaacctcgttaatatcaaacaaactagcctgtagatcaaaatgcgttattaaagatgaatgcggcctggacacagtggctcatgcctgtaatcccaacactttgagatgctgaaatgggagaatcatttgagcctaggagtttgaggccagcctgggcaaaatagtgagaccctgtctctatgatttttttttaaataaccaggtgttatggcatgcacctgtagtcccagctacttgggaggctgaggcaggaggatcacrtatgcgcaggagttggaggctgcaattaactatgatcactttactgcactgcagcctgagtgatggagtgagacccctgtctcagaaaaaaaataaggtgaagtgtgtcagtgtatgatgataaaatattccgttttccagtaagatagaataattattggccaggcacagtggctcacacctgtaatcacagcagtttgggaggccaaggcgggcagatcacttgaggctaggagytcaagaccagcctggccaacatagcgaaagcccatgtctactaaaaatacaacaacaacaacaacaaaaaactagccaggcacagtgatgcacacctgtagtcccagatactcaggaggctaaggcccaagaatcacttgagcccaggtggcggargttgcagtgagccgagatcacgccactgcactacagtttgggtgacatagtgagaytttctcaaaaaaaaaaaaaaagaagaattcttaactacttaacttgtatgcattctcaaatctgtcttcttctaaccttcactgtcacacttgagttcagaccttcatccgcccctctacttccatcctcattgcagttcattctccactcaacagacagtgtggtcagcctaaaattcagatggctcttgatgagaaagccccgattcctgagcttgatggactccatctagtggagtctcacctgcactagacccagctcccccacctctatactccatcatggtgaaagctatgcttgggttctccaaaacaccacatttcctctggtctccaggcctttaaacagctgctccatattcctggtctgatctgtttttctcttacttgcctagttggctgactccatcagggmttgacttcaatgccttctcctctgggaatccttctttgaccttcctcttttggatggggactcatcctattctgcttttatgaaccaccgtgtatttcctagcaatatttcacattttatcattgcctttttayttgcctgactccagtgagtaagctgtgaacacctcgaaagcaagcactgtgtcattcattcrtgatgtcaacaaatatttatcaagcacctactatatgccaggcattcttctaagagctagagatagagcagtgaacaaaaaagttaagcaaacacacccctgccttcatgccactctcattctagccaagggagccaaacaacaaactgggtaggtaaggaaaatagatggtttaatagaagatgataggtgtttgcagagaagtaaagcaaggagaaagatagggagtaaggggtggatgtgaaattttaaataagatgatcaagggaaagtctcagaaagaatatgacatttggccggtcacgatggctcacgcctgtaatcccagcactttgggaggccgaggtaggcagatcacctgaggtcagaagttcaagaccagcctggccaacctggtgaaaccttgtctctactaaaagtataaaaattagctgggcatggtggcaggtgcctgtaatcctggctactctggaggctaaggcaggagaatcacttgaactcaggaggtggaggttgcagtgagccaagatcacgccattgtactccagcctggayracagagtgagactctatctcaaaaaagaaaaaaaaaagaatatgacatttaagcagaaacttgaaagaggtgagagagtgagccattcaaacatctggaggaggcactcctgggtatctacccaaagaaaaaggagtcatcctatcaaaaagatgcctgcacttgtatgttcatcacagcactatccacaataacaaattcatggaattaacctaagtgcgcatcaagagtggatgggataaagaaaatgtggtgtatgtatatatatatatatgtgtatatatatgtatatatatgtgtatatatatgtgtgtgtgtatatatatgtgtgtgtgtgtatrtatatatatatacacatatatatatatacatatatatrtgtatatatatacatgtcatggaacactatgcaaccataaaaaagaataaaatcatatcctttgcagcaacatagatgtagctggaggccattatcctaagtgaattaacaaaggaacagaaaacctaataccacatgttctcacttataagtgggagctaaacattggacatagaaatggaaacaatagacactgtggactaccagagtagagagagagggaggagggtaagggttgaaaagtgcctactgggtactatgtttactatttgggtgatgggttcagtagaagcccaaacctcagcattatgcaatatatccatgtaacaaatgtgtacactaccccctgaatctaaaacttttaaaaatagaaaaamagaaagatacctaaaggaagagtattcaagagagaaggaacagccagtgcaaaggctctgagcaggagcaggcatggacrgttcacagatcagcagggaggcgcatgtggctggattaaataagatgatcaaggaaaagtctcagcaaacaatatgacatgtggctggaagttctggaagctcagaaagcyattattggattgcaagacccatcgcaaggatcttggacttttattttgggtgagattggaagcttccagaagattttcagcagagagatggcacaccctgactccaatttaaagtaacatgattttaaataatatagtattttaaaagcagtcactctggatggtgtgttgataaaaagctgagggaggcaaggagggggaactggggaaccagtyaggaggccattgcactaaccttatcaagaaaggaagttggyttagaacagggaggtagctgtggaggtggaatctggatatgatttgctaatggattgaawatggtggatcagagaaaggggtaagtaaggtgtttggcctaagcaactgtaaggatggagttatcattaccaagaaggaatagatgctggatgagtgtatgggtgatggtggttacacaagaggatcagttcagttgggtcatctaaatttaaaatgcttattagacatccaagtggtatgtcaagtagggagctggatatacaaagttggaattgagrgaaatttttggtttggagatagaagtttcaaacagccaaattagcatgtaaatgctattgaaagcgctgaggatggaaaactctccaagaaagtgactacatataggagaagttatatcaactgtactcagcacagcgcctgggggcaattgaagtttataatttatagatcctggtttattaggctgttcttgccttgttttaaagaaatactggagactgggtaatttataaagaaaagaggtttaattggcttttggctgtacaacatctgctcagcttctggtgaggcctcagggagcttttgcccatgacggaaggtgaagcaggagcaggcacatcaatgggcaagagtgggaaaaagagagtgaggtgagaaggtcctagacttctaaacaaccagatcttgcattaactaactaagcaagaactcatttatcaccaaggggatggtgcttaaaccattcataagggatatggccccatgatacagttacctcccatcagaccccatctccaacaccgtcaatcacatttcaacatgatatttggaggagacaaacactcaaacygcatcacctgataacctttaaaagagcaatttcaataaagtaacaatggcagaagttaggtttcaaggcattaaaggtataagagagaggaaattcaaattaagagataagtagagctgtggctagagtcataaagatccggttatatttgtagcttgattgaagaaatgaaagaaaggagtgaataatggcttagggtacctacagtgtgggaagagggtcagagaccgaaggaaatgagagtgaaggaagacaggtttttgagaagtaagggagacaacttttcaacaaaatggaaagtaatattctctgaaggcagtaagggcccaggacaccaggataggagattgaggaggaagaacacatttttaaaaatctagactctggcagggatggaaggcagtgttggttgacagagagtcacatgaggcaaatgaaaagatgagaagggcccaggcacagttggaacacaggtctccagtgggtgtggtcagttggcacctgtccctggctgtgtgaaagcaaagaccaaggagacccgtaaaacctgtagttcagagtgaccatgaggtacctgggtggttggtgtgatcacagaggtgtattaaacacactacttgcactggcaatgaacattctgaaaagggaattaagagaacaaaaccatttacaatagcatcaaaaaggattaaatgcttaggaataaatttagccaaaaaaatgcaagacatgtacactgaaaatgagaaaacattattgaaagaaattaaagatctaagtaaaaaagatatcctgtgttcatggattagaggacttaagagtgttaagatggcatttcttcctaaattgatctagagattcaatgcaatccctatcaaaatgccaactgccttttttttttttttttgcagaaatggaaaagctaatcctaaaatacatatgaaattcaagggacacaaaatagccagaacagtattgaaaaagaacaaagttgcaagactcacacttcccagttctaagacttrctacaaagctataataatcaaagcagtatagtgtggcacaaagatagacgtggagatcaaaggaatcacatttagagtctagaaacaaaccctcacatttatagtccattgatttttgacaagastgacaagacaattcaataaggaaagaatagtcttttcagcaatggtgccgggacacagatatccacatgaaaaagagtgaatttggacctcaaccttatactatacagaaaaaaaattcaaagggcatcaaagacctaaatataagagatgaaactataaaattcttagaaaacacaggggtaaatcttcatggccttggattttgcaatggtttcttagatatgacttcaaaaccacaaataaccaaagaaaaaaatagctactttgtattttaccaaaaagaaaaactttgatgcttcaaaggacattatcaagcaagtgaaaaacaacccacagaatrggagaaaatatttgtacatcatatgtcagaaaaatgtcttagtatccagaatatgtaaagaactcttaaaactcaaaaataagaagacaaataaccctttttttgatggtcaaaagagttgaatagacttttttttcaaagaagatataaaacggtcaataagcaaatgaaaagatgctcaacatctttagtcattagagaaatgcaaattaaaaccacagtggccacttcacactcctactaggatgactagaatcaaaaaaagcagacaataacatgagttggccaggatgtggagaaattgaaaccccggttcattgctggtgggagtgtaaaatggtacagctgctttggaaaatagtttggcagttccgtagaaagttaaacatagagttaccatatggcccaaggatgagtaattctactcctaggtgtatacctcagagaattgaaaacatatgttcatatgaaaattgtacatgaatatccacagcagcatcattcataatagccaaagaatggaaacaaccccaatgtcmatcagcttgaaaatgaataaacaaaatggtcaaaatgaggagaccacaccttgaagagacacattaaagcagcacatacatccagttgctccaaagacctgaaaggagaggtctgggggctggaagacattgtgcaggagagagaatcacactgaagcctaggaaagttgaagccagaacattctagaggaaggccaatcagtagcatctccaggcagagaaatacacctagacaaagacttagaggcaggaaagcctaytgaaygtgcagaggacaggaagaagagacgctcaaggaaggagcatgagggatgaggagtcatggtaggtggacaataccccaaaggctcctggttcaggactggggcaaactttggacatttggttgacagcagatccaagggttcgctacccacctgcctcatggtagaaaagcggatgtgagatctgtttgcctaactttagccccatcattcttcagaccacagtactggcttctaactttctcagaaaaggaggcaagtattggtcccttggccagaccagcagaacctatgcacatgacccagtattttcagtgagataaacaccttcccctggaaaggaaatcccactcaggggccctcctcacctgccccagcctaccctgcatggctgcatggcttaggactgccatgtggcctctgcaggtcctggcattctaggtctcattgtttcactccctaacagacctcagaaaggagaacctctaactcccagtggcatttagcttccctctttaaacrtctgggtcacagatatgctcagttaattaatgttcttagtgctgctcatctgcctgctggataatagattgattcataatttcagtaagcagctgtgtatatctttccctgaacataaaggcagcttgctgtcattcatcactttgcatttggagaatttaaatatattcaggcagacattgtttagggasggggagggagggcttctgattttcttaccattttgcttctaacaatgactttgatttggaactaattggggtttaaagcacacgttaaccacatctctctcaagggcacttaataaactccctgtcccttgttcaaggagaccagccaggccctccttttgggataagagccaagagcttctgagtacctttcaccaagaaatgagaaccccatgcagagaatcttatctgccagaaaagagccactcctgtccctgagcagagctacttatttcattcctgggcagaatatgctcaagctttctggaggaggtggggttctcctggcaatctgggagggggctcttctgctgctcagctgctgggccatggcagccaaccatsaggtattyggtgaccaaaagaaagcggccagcacccagccaggtgaccagatgtcttcatgcctcagtttcctcatctataaaatgtaaagaataataaaacatatcttgcagagttgttgggaaaattgcattatttattctctttacaatggttagaaatgatgcagagtatttttttttaatttattaggcaacagctgtgtagatgtggctgccttttcaaatgatgccattcaccacagttatgtgctcaaccccaaacacgttttgagcacttggtctgtgatttgctcctagtaaggaaggaaattaattaggcacagcccctccctctcaggagtgtgaaagatggatgaatgaatgcattttttttattttggaatatgattcttaaacaatataattttccttccccaggaaagtaaaggcagcagaggcgaggctactagcctartacaggccctgttgtgggaaggttgccgggcaacaccttccctgtatcagtcaggaattgctgcataacaactaccccaaaacgtagtggcttaaaacaatatgcattttttattgctcacgagtctacaggtcagctggatggttctctgatctggactaggcttggctgatctaggctggactcattcgtgcatctcctatcagcagctggcaggttggctgagggctccctgatccaggttggcctcatccatttggttaactggtggttaactagcaattggttgggccacatgactctcatcctcaaacaggccagcctgggcttactgttccaagagactgaaaggattcatacaaggctaaaagtctagtctaggaacaggcacagcctcacttctgctccattccattggccaaagcaagtcacagggccaaccaacattcaagggatgggggaacagactccatttcttgatggaaattgcttcaaagccatcttgccatgggtgtatagaaggaatagcggaggatgtggtcagttttgcaacctaccacaatcatccagcatttgttgttgtacatagagcataaagcaagtactaggattatgttgcccacttgcagtatttttgctctgctctttcattattataaattctgttgcaataaataccctacccatgaattttttgtttgcaattctgattatttccttctgatagagtgtattagtccagtcttatgctgttaataaaracatacccaagactgggtaatttataaagaaaaagaggttttaatggactcatagttctacatggctgaggaggcctcgcaatcatgttggaaggcgagggaggagcaaagggatgccttatggggtggcagggaagagagcatgtgcaggggaactgtcctttmtaaaaccagcagatctcatgagacttattcattatcatgagaacagcatgggaaaaacctcccttcatgaatcaattacctcccaccgggtccctcccacaacacatgaggattatgggagctacaattcaagatgagatttgggtggggacasagccaaaccatatcatggagttctacaaatggattctttttaatttctattttgattcagaggagtacatatataggtttttaacaagggtgtattgcatgatgctgaggtttggggtatgcttgaaatcgtcacccaggtagtaagcataatacccaataggtagtttttcaactcttgccttcctttctccctccctccttttggcattcccagtgtctgtaatttccatctttatgtccatgagtacccaatatttagctcccactcacaagtgagaacatacagtgtttggtcttctgattctgcattaattctcttagaataatggcctccagctgcatccatgttgctacaaaagacatgatgctgttctttttcatggctgtattgtattccatggtgtataggtaccacattttcttcatcaaattcaccatttatgggcacgtgggttgattgcatacctttgctattgtgaatagtgctgcaatgaacgtgtaagtrcatgtgtctttttggtagaatgatgtcttttcctttgggtagatacccagtaataggattgcaggtcaaacagtagttctacttttagttctttgataagtctccaaacttctttccacagtggatgaactaatttrccttcccaccaacagtgtataagcatgccttcttctctgcagcctcatcaacctctgttattttttgactttttaatgatagccattcttgctggtgtgagatggtatctcattgtggttttgatttgcatgtgtctgatgattagtgatgatgagcattttttcacatgtttgttggccacttgtatgtcttctagtgagagtgtctgttcatgtcctttgcgcataaaagtggattaattgaatcaaargccatgaacattttaaaagaacgaagtatatatttagaaatctcctttttgaaaggttgtagtaatctaccctccctccagcccaatagtgagagggcccatcttagacttaggtcaccaaaatgtggtgaataatctctgattttagtttcagtttttgggttttttttttttgtttttttggtttttgtttgttttttgagacagagcctcactctgttgcccaggctggagtgcagtggcacaatctctgctcactgcaacctccgcacccccaggttcaagcaattctcctgcctcagcctcctgaatagcttggattatagttgctcaccaccacacccagctgatttttgtagttttagaagagacggagtttgkccatgttggtcaggctggtctcgaactcctggcttcaagtgatctgcctgcctcagcctcccaaagtgctgggatcacgggcatgagccactgagcctggcctaatctcttttgtaaaatgtggtatcttattattttagatttttgtttcttttcatacctatgaggttgagtactgtttaatgtctgtttcttcagtgaatggcttctttgagccttttgcagcagggtagatttagtcaatccccctttgtaagtggggaggaaatggagactcaggttacttgttcaaggtggcccagccagctgaaagtagagccatttagaaattagacatccagcttcttcatctattccttctccccgatgttgctgaacagaagactaggtcctaaaacattgactgaggatatgcttagataaaagatcagggccgggcgccgtggctcatgcctgtaatcccagcactttgagaagccgaggtgggcagatcacgaggtcaggagttcgagaccagcctgaccaacatgrtgaaactccatctctactaaaaatacaaaaattagccgtgtgtggtggtgcgcgcctgtaatcccacgtactcaggaggctgaggcaagagaattgcttgaacctgggaagcggaggttgcagtgagctgagatcgtgccattgcactccagacaggacaacagagtgagactccatctcaaagaaaaaaggaaaaaagatcagagagttgccctggggactctgtatccaggctcagaagcctgggtggctttctggaacagggctgtcctgtgaggtgagcatatggcctgagtgacaggctgggatggtggccagractgcagtattgacaaacagcaggagtaaagccgagagacctgagccctgcttcctcccatgtctcactcctgcctcccacttccattcccctgctgctctggtctctcgacagcttgcccgctacaccaaggaaggcttcctgcacttgggtgccctggggaccaccacactcctccctgacacccgctgcctggtggacaactccaagagtcggctgccccagctcctggactgcgacaaggtcaagagcagcctgtacaagcgctggaacttcatccaggtgagtgctgtatggacagagccagcacccagagtagctgcaagaggctgcagaccacagaggggaatcctgcttccccaggggtccccagcaaagagcgaccccgaacccaggtctycctgccccgggctgggcttgtggacccaaagcacttcctgggggcagctgtggagtttctgcatggagtagcatttctgattcctatgtcagtgctaggctggttgagctctgatcaatcctgagataggagtgaggggggacttccttgaaatccactaagtacccacagccagtggggttgagaccatcagaccaagaatatcccaggaaactcaacatcctgaccccctcctgaccccatcccccaccccccaccaacgctcctcacctgattcagatactccaactgggtgaagcttatttaggttctgacttcagagtccccagaggaggtcctcatgcttccctgccccagtctcatgcaaagaattttggtggaattgattctctgcaagaagctatgtgccaggcgccatgatagttaagcctctctctctctttctttctcctattgcactctctctctctccctctctctccctctctccctctgtctccctctctctgcctctctctccctttctctctttctcttctctgtcttgtctctcctctatctcctgtcttctctctgttcctctcctctcttctcttttttctctctcccctttatctttctctttttctctctctcctctctatcttctctcttctctcttctctctcttccctctttttctacccctcctccctttctttgtcttctctttgtctctttgtctcrttctctctcctgtctctttctcttctgtctctatcttctctctttctcctctcttccctctttttctctctctcctctttctgtcttctctttgcctctttctctgtctctctctttctcttctctttttctttttctctttrtcattttctctctcctgtstctctttctcctctctctatatctctcgctgtctctctctcctctctctcttctcctctcttctcgattttgccccctcccagaatggagccatcatgaacaagggcacgggacgctgcctggaggtggagaaccggggcctggctggcatcgacctcatcctccgcagctgcacaggtcagaggtggaccattaagaactccatcaagtagagggagggagctggggcactggagcctggcccccaggacatggctsctccccccaacatctggaccagctgccctggcggagagacagcaaggggccggcaggtgctcgatggsccccccagggcttctccagggcagcacagggaccccggatgaagactctgtcccccctcaggcattcagctgcccacaagtttcctgcaccctggaaaagccccccacccttcctctgggaaactgacagctgtcttccacagcctctgatgtggacctggtactgaggagcaagactgtccagttctcctccacatctcccatcccagaatcaggatctgggactggcagggtcccctcctgtgtctcatctcttgcagcagcagctgctgaactccagccatcaacacggtgggaggcagcgggggcttcagccatgtcctagctccccgccctaaaaggaggcagtgaggaccaggcactatttcctccgaggttacttctacccagatgacacctgcctgttcacgccccaaggcagctactgcccctaacccttcccaccagggtagctttgggcactgcagctctggacttttctggcccctcctgagatgacctgatggagctgatgctttctctcctaatccctgggcactaggctcttatcartgtgcttgggccagctctcctgcctgtgtctagaggaagccagagacagaaataggctaagcctgcagtaggatctcagccacaagggccccgcaggatggagctgggtcaaggaccagggagccctgactcccagaggctgccaccggggagaagcagcggtcctccatccagaacctaagggctgaagcaaaggctgccaggacccttgaagatgcttttggctcacctcatttcaccccacgctctgctggctggcagaggagaaggcagtcgtttcctctctgaagagtatttttttcgattgccctctggttagggtgcacatataaatcagagttaatatatgaacgcgtgtgcatgcacaaktgtgtgtgtgcctgcgtgctgtgcgtggcagggtgtgtgtgtgtgtgtctggctgtgcgttccggagtgtgtgacgatgctgacctagctgtgtggccttgggcttgctgcttcattactcacctggatggggacgagggatgagaagggtgtgggtttggccccatgtcactggccggaaggatgtgtctcagccctgccctgtggggtgcccccgatgggaggctgtcccatctcccagtccccatctctttttccccacactgtccctggccaagccctgcccagagctgaaccctgtagctgcccccttgccctgtgtgggattcgcagtgtctcatttggtgacgtcttactggtgatcatctcctcaccccatctcccaccttgtggaataaatacatgttagcacttcccagagcagcctcctttgtgtcttgatttctccagaactggaggtggggaggggagtgatggagacataggaggagagcttctttggctttgagggtttagtgttacttatttatctatttattcgagatggggtcttgctctgtggcccaggctggagtgcagtggtgcaatcatgacccactgcagcctcaaactcctggggctcaaatgatcctcccacctcagcctcctgagtaactgagactacaggtacacatcaccgtgcctggctaattttttaaaaaagatttttgtagagatggaatcttgctatgttgcccaggctgggcctgaactcctagcctcaagagatcttcccaccttcacatctcaaactgctgggatttcaggtgtgagccactgcatccagctaattaaaaaaaaaattgtagagcggggtcttgctatattgcccagattcgtttcaaactcctggcctcaggcaatcctttcacctcagccttctgagtaactcgaaccacaggcacaggccactagacctggctgatttttgagaaacaggttcttgctatgttccccactctggtcttgaattcctgacctcaagtgatcctcccacctcagcccctcaaagtgcagagattacaggtgtgagtcagtgcaccaggtctgggtttgctcttagtaaaggcaaaaggcccccgcacactggggctgactaaggcaatgccgttctaccctcacactcgccttttcccccttaaagcaggacagaactggacacctgaccctcgcttactaacccttgtgtgtcccaggttaggaacgtcaggttggcacagaaagctgtaaggaagggacgacttaccatgggacttggcctgatccagccgcttcctgccactatccagaaaattccaccttttttgtttttttttttttttgctcttctcacccaggctggagtacagtggcgcaatcttggctcactgcaacctctgcctcccaggttcaagtgattctcctgccccagcctcctgagtagctgggattacaggcgtctgccaccacacctatttattttatttttttttttagtaagagacggggtttcaccatgttggccaggctggtctggaactcctgacctcaagtgatcctccacctcggcctcccaaagtgctgaagttacaagtatgagctactgcatctggcaccccctcttttttagggccacacagtggcaggacaagatggcccgctttgcttgtttatgtggcgtgggggatgctggctcaggacccctgagactctctggtaccagcacatgtgctctgagctctgaaccttggttacaaggtccagtagcctggaggtgctgttcacatcagcaccatctgtcagcagcttccccccatgggatcaggatacctggggagactgctcagagcatgaggtcagcatcccagggcaacaccctcttgaccccatggggtcccatctgggcttgatggcactgggagtggccatggaccaagggagtgaagaagaattaacaaagcaagagaaagggaggaagagaaaagagaagcaggaccctggtgggaaggaaaggattggtcttaagtcctttgggagaatttaaaagctctggatggccgggcgtggtggctcacgcctgtaatcctagcactttgggaggctgaggcaggtgaatcacttgaggtcaggagttcaagaccagcctggccaacatggtgaaaccccatctctactaaaaatacaaaaattagccaggcgtggtagcgtgaccctgtaatcccagctactcgggaggctgaggcaggagaattgcttgaacccaggaggcgaaggttgcagtgagccaagatggcaccactgcactccagcctgggcgacggggcaagactccgtctcgaaaaaaataaataaaagttctggagatcgtaggagttcgagaccagcctggacaacatggagaaaccccatctctgctaaaatatacaaaaattagctgggcgtcgtggcaggcacctataatcccagctactcaggaggctgaggcaggagaaactcttgagcccaggaggcggaggttgcagtgagccgagattgcaccactgcactccagcctggacgacagagcgagactctgtctcaaaaacaaaaacaaggccaggcaccatggctcatgcctgtaatcccagcactttgggaggccaaggcagatcacgaggtcaagagatagagaccatcctggccaacatggtgaaacccaatctgtactaaaaaaaaaatacgaaaattagctgggcatggtggcgtgcgcctgttgtcccagctacatgggaagctgagggaggagaatcgcttgaaccagggaggcagatgttgcagtgagctgaggtcacaccactgcgctccagcctgggtgacagagtgaggctctgtctcaaaaaaaaaaaaaaaaccagaagaaaacaaaaagttctggagaccccatgtctctgcacaaggatggccagggcagcaaactccaagccttgagctgaagggaaatctcacactccttcattatgtcagtcattggcgtcatctatagtttgagaagtgacagatccatttcctgacctgagcaccctccatggtcccctctgccgtgggggagaatgcaggacaggacaggaggctgggctctggctatgtcaccctcctgccctgcccagccccttcccctcacaccagaactcctgccctcccctagctgtgaccatttctttctctttcctctaattttttttccactcaatgtatatggcaagaaaaaaaaaacaaaaaatgttgcagatggtagtcctggtaaatgctcaagccgtcgaagccaatgcctttgaatctctgttatttcagacatctcacatgttttctttctggttagatggatgctgggggctaaggaaagagaagaatcggaaaagatagaatcagcacactgggggccagacactgcccttataagccactccaagccttttttgtgagtttctgaagccatttttttcatctgatattttttctaccatccttgaaaaacaacccggtttcataaagtgagggaggcccctgagcagagcagatcactcatccagggctgcagtgagtgagttatcattgattgacgtgctatttctcctccttcctctttgccaatgcttttctgggaagggtagggtcacagccagccaggaaaaggcttgcaaggggcttggagcctgtgtagggaactaggcagttcatgaagctttcccaggcttcaataagcccagcggctgaagccaggagcccagtccctgctgagtgtcaggatgtcagcctcatgtttccatctgagctccctgtgcctgccaatgatcagttcctgatgtcccacaatcatgtatgtctgagtgtcttggcttccctgttttttcacttctcagataagtctccttagacccaagtttggggatcactgctcaacctcaaagtgcagaggtgcatttcagttctgttcaacaaatatatttggacacctctgtggtttgctccttatgatttcttttttcttttctttctttcttttttttttttcttttttttttgagacaaagtcttgctctgtccagcccaggctggagtgcagtggcacaatcttggcacactgagacctctacctcccgggctcaagcgattctcctgcctcagcctccagagtagccgggattacaggcacctgccaccatgccagtctaatttttgtatttttagtagagatggggtttcaccatgttggctggtctcaaactcctgacctcaagtgatccgcccaactcagcctcccaaatgctgggattccaggcgtgagccactgcacctggcccttatgatttcttggaaaaggaaaggagagagagagagaggaaaggagggagagaggagattgagctaaaatgtgttaagtgcgaggcactgtgatgaagagagaagcagcatggtttttgcccttggaagctcctatttaagagaagaaaacagacactgtagcaggacgagtcgcagataaaactcctcagacaccagatgaaagaaggaagaggtttttattctgccgggagcgtcggcagacttcgcatcttaagagccgagctccctgaaaaagaaattcctagcccttttaagggcttacaactctaaggggtccacatgaaagggtcataatagatcaagtaagcgtgaggaacgtgcctgggggctacatacatcagctaacagaacaaaaagttttacagtgctttctcatacaatgtctggaatttacaaataacaccagtagttttggccgggggttaatattattattattattattattattattattattattattattattattattttaaccaccagggccaggtggtggcgccaaggtcgtctagctatttatcttacttctgcttctttccaactttttgctttctcccttttctcctgtcttataaactagggaaaagggagggttggggagaagctggggaggacaacaggagaagtggtggtctcattccaacacaatatattgggcttctgccctgtagcccaagcagtcatgaaatggggtctatgcctattggcatgaatagggctccaggcatattagaaaattccagtgttctttcccccaaagaggccccagccgatggatggacctcacacatgtggcttccagcttgacctcctctgctgggtattgatacagcctcccattactgattagccaaaaacaaggaaccaagaacggaaacaaggagagccagacagggatcaatcgataatgctgtggatggttccagaagacaggatactgtccagcctcaccagagattattatcatccttaatacatggttgatgggctcatattcctccaggaacacaatcgcatcttacccactcccctagtggacgcccgcctacctgtccaagtaatcagtcagtatctgcttgataaactctagagacaggttgttctaaggcaggaaaactctttctgacagtgagccaagcatgatctgaatctcaagaatgtcttcccactgtccctccctctggaggctgaagacaagactaagctttctgtcatctgatgagatttaaacctacagtgaaggctgggcaaggcacctcacacctgttatcccagtgcttccggagtacaaggcgggaggatgcttgaggccatgagtttgagacaagactgggcaaaatagtgagacctctggccgggtgtggtggtcatgcctataatcccagctccttgggaggccaaggaggctcgatcacccaaggtcaggagttcaagatcagtctgggcaacatagtgaaaccccgtctctactaaaaatacaaaaaaattagctggtgatggtggcacacgcctgtaattccagttactcagaggctgaggcaggagaatcgcttgaacctgggaggtggagtgttgcagtgagccgagattgcaccactgcactccagccagggtggcaatgggagacagagcaagactgtctcaaaaaaacaaaatgatacaatacaaacaacaacaacaacaaaatccaaatagtgagaacttgtctctacaaaacaaaaaatttaaaaactaccccggttgcagtgagctgtgattacatcaccacactccagcctgggcatcagaatgagacccctgtctctaaaacacacaacaaatttaagctataggatgcctcaaagtcagtgggcccctttaagcttgaacacagctgccataactataaggggaacaacctctattccgtgggcagcaccttgatcagtggatagaattcatttctgccacctggagaaatggttaactttcttggctagagaagccatatgccatttcctgcaggatggggtg

SEQ ID NO: 94276 - DNA, 57998 bp, Homo sapiens
tttagccccccgagtagctgggactacaggcgtaagccaccaggcttgtcttaattttattttttgtagagacaggatctcactatgttggccaggctgatcttgaacttctgtcctcaagcaatcctcccacctgggcctcccaaagtgctggaattacagatgtgagccactgtgcctggcagaattttatattagacaaagctatctgaagatgaagtaggtagctttggaaaagaatgaatttcccattgtttagggcattcaagcagaagcttggtgatccctttactgatatgttggagggcaatttccagaatttagtttaactggctggctgaactacatgattttgaagaatccttccaactgtaaggtttttcatttgttctgtttttttaggagatggggttttgccatgttgcgcaactaatgaagtccatctaattttgccactggatgcattatgacactctccctgttttaaaggaatgtattaaatgaatcaagctcattatgaaaccagtaaaattttctcctatgaaactcatcatataacacagacattaaagatgggaatatgtgcgattaaattgtttgggagattctactctaaaataggtgacctgcatttttctccctagaaataactgctttttgtggcaactttagttcttgatttatctttcctaatgcagtctattctctaatgagaaatctgtttttttgaggcagcttaatgatctgaggttaggagtcagacacaagtttgaattccaattccaaatccttcgtagctgtgtgatggagcaagtcaccaaattcctctgaattggttttctcatctgtcaaagggagatagtaatgatgtctcccttacgggattgttgtgaggcttggggatgatctatcaaaagtgcccaatgtaggcctgagcaaccccactgtgggcgcggctgtggaatggctttgggtcttgaaaagaaaagtgcccaatgcaggaggtacctaatattattatacatatatatgtatgtatgtattttaatatattttatagtaacaaaacttgcttgataggtaaataaatacatggcccactatacaggtcccctgtttttgtcaggttgtctggaattactccattacagatttagtcctttgggaaggttataggatgtatctgccatcaaaatccaggtatgccatggggaggtattatgcctttcactaacaagttttcagttgatagcttattttataagtaggaataaaatatgcaaaatatgggcttattgtagacattcatacaacatacatcctctctcatctgagatttcagactcctagggatccctggcatagctaggttttttgcaaaccattttcattatttcaaaaatcctaatagaaattgtactcaattcctttgccttactctaattccttgctagctaaaagatcctttctttgcaaatagttgaaattacatcagctcagtaatgcaacactatcccatgctggtgtggcagttaaactgcatttgtgtcttattcatagattagaataatgaccatggatcaatcatccctaaatacaatttatcagacaaaatgttacaaaatttcaaatcttttttttttttttttttgagacagtctcactgtgttgcccaggctggagtgcaatggcatgatctcagctcactgcaacctctggttcaagcaattctcctgcctcagcctcctgagtagctgggactacaggcacatgccaccatgcccagctaatttttgtatttttagtagagacagggtttcaccatgttggccaggatggtcccgatctcttgacctcatgatccgccacctcggccccccaaggtgttgggattacaggcataagccaccacaccgggcctattttgtatttttagtagagacgggtttcaccatgttggccaggctggtctagaactcctgcccctgtcctcaggtgatctgcctgcctcggcctcccaaagtgctgggaatacaggtgtgagccaccatgcttggcacaaatcttttttcttgtttccttttttttttttttttttttaagacggagtctcgctgttgtcacgccggctggagtgcagtggcgcaatcttggctcactgcaacctcagcctcccggattcaagcgattcttctgcctcagcctcctgaatagctgggattacaggtgcctgccactacgcctggctaatttttgtacttttagtagagacaaagttttgccatgttggccaggctggtctcgaacccctgacctcaggtgatctgcccgcctcagtctcccaaagtgctggaattataggcgtgagccaccgcgcccggccccagatctttttttatgtagtggcgcgcacatacacacacacacaccccaaaccaaaatgtcaagtctatgaggaagagcaatggaaagagcctgaagagaaaagattgggaaccatggcattttgagaacctatctacagctactaaggctttttgggtgttgggaaaacaggctattgcttaacaagggtggggaagagcgacatgaatgtcatgaaacaagaatgggggcatcaaagacaaattcatcattactttgctggtgtcttacaggactttcttccctttgaaaccttagtaacattttttcccctttggaaaaaatgtcagaggtcctaagagcgggcctgaaaaaagaaaggagtagatgtctggaagaagcagaagccgcttccaaacattacttggataatggtgccctcttctggggtgactgatgtgacaatgtgactctgaaaccctgtctcctactacttggttcaaaacatccagaaagtaattgactaaagaaacaatgagactaaaggttaagcacttacaaaatcatttaaaagtttgaatttaggagctagatacatgcataaatatacatatgataaatgtattcaaagatgtctcttttccttttttttttttttttttttttgagacagagtctcactctgtcacccaggctggagtgcagtggcgtgatctcggctcactgcaagctctgcctaccgggttcacgccattctcctgcctcagcctcctgagtagctgggactacaggcgcccgccaccacgcccggctaattttttgtactttttagtagagacggggtttcaccatgttagccaggatggtctccatctgctgacctcgtgatccacccgcctcggcctcccgaagtgctgggattacaggcatgagccaccgcgccggccaaagatgtctcttttccaatgctgtcaaaacctcaagctaatgtaagcacctctgtacctcatttccatagtgctgttatatcagcggatccaatttcctgtgctatcagcattactcttctcacttttctagcaagattttagaactgacttggtttaggttccatggcaatgggaaaaataccctcctccttccctcccattctctttgcctttacgctctttctgcttttccatactcaacacttattttgtgcccccaatatgtcttaaatcagtttttaactgccacttaaactatttccatgtcacagcatttaaaaatgatggttcatgacgaagctgctggggataaaacgttcaattcctcttgtcacataagattgacgtgcagacgcaaacaggttatttgatgacttttaccttcaactctctaactacagagtaaaactaacctagtcctgtagttctaaaaagattagagagaggcaagtttggaaatagtcatcttctttttatatcttttttttttcttttgagatggactttcactcttgttgcacaggctggagtgcaatggcttgatctcggctcaccgcaatctcctcctcccgggttcaagcgattctcctgcctcagcctcctgagtagctgggatcacaggcatgtgccaccacgccccgcgaattttctatttttagtagagatgggtttcctccatgttggtcaggctagtcttgaactcctgacctcaggtgatccgcccaccctggcttcccaaagtgctggcgtgagccaccgctcccggcccttttctttttatatcttaatggtcagtttaaacaagctgaggcaaagggcaagggaaatctttataggaccttgtaacaggagtagcaactgaagcacccaactcttaagtgttgtaaaagaaagtacatcagtgactctggtaagatgtttggaaaataaagatgttctaataagattgtatcttgaattattgtgcattttaattattcatgcacagtatgcctccccctaaccccaaatctcatcagacacaatctcttgagatttacagacagagcaaatatgaagaaaacaaagttctccactcctgcatcccgttcccacgttttctagttgattgaggcaaaaatgatatccccggagaacacatgtgtaatgtggtacatatttttttcagctaagccactccttggtcaaattactgacacatcggtttatacttgccctttccatctgacacagacagcagccagagatttggttcagtgaatttagggcttagaaaggcagagtctgtagtgttgcaagtcacagaaggtcattctaaaacactcgtatacttgttaatcacttgaatagggagatttgaacagtctactcctttcttttttttcaggcccgctcttaggacctctgacatacaaatgaatgccaaagagtgctcaggagctcaacttttacttcagctgttattaaccttcaaccacaagacaataacatctgttccttttatcccaattttacgtgcggcattcttagccatatctacactgtgtttttatgcacatcatcataccctgttgtagggctataaagaccctactatggtagaattgggagtggactgagggattaggacaaaaggatgtggaaaaccgcagatctagagatgcatagctattctcataacctaggaagagaggtggatttctccgtcatcaatagctgaacactccttgtgtttctaagtattgaatccataaagttacatgcaaacatacagcccttgccttcaggccaagccgtagttatgcagaaggcttgaagcaatcacagatttaacatttgtggttccagctattcaggaccaattcccaaactccacgacatgtaacaatttgtaattttgctaggacacagtttgatgcttaggttttaaggctggtgtgctagacgttatcaagtggtttgtgagagtagccctgtgtctccattgggtagagtagctgggtcgcaaggatcatgaagagatgaagaaatggctgtgaaaagccaactagcctcggtgatagtaagcaaaggtatagaaacactaaggaagttaccctttgtattgtcaaaggtttcagttttgtgtaaggtggtgattcacgggcagttaatctccatcactaaaattaaatccttttttattcattgcaaatagataatctgtggaagacattttggcttttctcgctagcagaaaatgtgaggcttcttcaggtttttcctgttcattgtttcacgggagcatcttccccaaaacactgcaaaactcaaagttctcaggctgatgtggcagaaagagcattgatctcggcttcaggagctaaattctctagtcctgactgtgccactaacagactgtgggacttcagacaagtacattcctttctcgggtttcttatgtcaaatggacagcgtgagaaggatcacaatgaaccagggatcagcttcacgattaaaacctaagacttaagagacggacatctgtccgttcctggctacacctccggcccatctggcccaccccaaactgcgcgaagcccctctccaccgacgccaggcctgtggcctcgcgcgaagctgttggtcgttaacatctcccccgcaatgggcgggatggagggcttcagcttccggctgcaaatggcgaggcggcgcgcggcgttgcccactggcctcggcatgggcctgcccacgcacccgcccagcgcgcgccggaccctgtctaccgccgttgaagggcttcccagccctagcagtgcgtactgggaagcccccaaaaggctctgcgaggccgaggagacccgttcggagtgggggaggggaagataaaccgaactatttatgttaatcagtgcatgcttcctttatggagattggmcagggttttactctagtaaccaatcacttcagaacaagggcgggcccgttgatatctctcacactcattggttgagaggttgcggcgcaatggaaggtcttaaaccgagagtatccgggattatttttccccgccgtgcggtgcgtgtcccggaagtgacgcatggccaaggccgggcggcckccttgcccccgcttcctttcacgctgtygctgcccgtaggtggttgtggccactgtgcccggagggaggcggcggtggccagtaatgcctgggaaactcctctggggggacattatggagctggaagcacccttggaggagtccgagagccagaagaaggagaggcaaaaggtgcgctgagcatgggccgcgcctccttttgggctgcgccggcttgggcggggaggggaactgtctgtccctgatgatggcctgtcagaaccgggccggagcatccgagggcctcccttcgcgccgccctcggccctctggggtcgctcagggaccgtttccacctccaccctcccgacctggagaaagatggccctgggctttgggcctctcctccgcgtggcccctcagcccttcccgttggcgcctgaatctcagatgggcagactcaagctcccatcaccatggaatctrttctttctctyctgaagcagtgacgcttgccatttcgttttcattggccctcttagaagatgattaagaaaaaatgattgctttgaatatgtgttgcttctgtcaccccgtcccctgtgcaagaatcctggggaaagcgatcttaggtttacagacctcaataactagtctgtagaggcttaaggaaaagtgtcactgagacttgccaggatttgtcagtgatggagatcgtgtgggttgcattattaatagcctttactgtcagtattttcattcaatccgcaggtgtttattgaacctaatttgtaccatactctttgctgagtaccaaggaggttaaactaaataagtaaagaaatggtctctgctctcaaggagcctgtagaggagttgtagtctttcctcctcccagccccctgccctccaaaaaaaaaaaaaaaaaaaaaaggaaaagaaaaaacatcctgaaacactcagaggatcacaaggtgctgaaaaaatgcccaggtaaaattattactggagacatttgacctggaaaaaagaaatcagctgaagaggctaaggtggcagtattcgaaggctgacattcgacaaaagaatgagacttattttgtatagccttagaaagcagaatctacctctctgaccttatcactaaggtaaacttgccatttcagctaacacttttattgtgctaaaatacacataacgtttatcattttaaccatttttaagtatatagctctgtgacattaagtatatttacatcgttttgcagctgtcaccatcatccatctccagaacttttcattgtcccagactgaaactctgtgcccattaaacactcacttctcattcctctctccttccactcccggcaactaccattctactttcgctctgtgaatttgactactgaagttacctagagtgtaagcagaaaaccaagcaggtattttaaaaaaggcttcttttgaaattcttgtcttttgcatcccaatcctgtccagcggtcaaggcctagtttatgtctttcctgacaacccgaatgtaccgttatctagtttcagtggctatcttcatcatttgattgacatttgttatgcatgtctatataaaattagttcatttttcctgtatgtatcccacatatttcccaaaagttcttgaggaaagtgaccaaatctttatccatccttatgtttcactatgttgttttaaattggtggctttcacattgtaaattctccagaaatacatattgactgccctttaactatgaaagataaccagagatttggaaacgaattggaataccaactaaaagaaatagagcattagaatacaggtctggtggctagctgcagtggctcatgcctgtaatcctagcactttgggacgctgagatgggaggattgcttgagcccagaagtttaggtagagttttgtagagaccctgtctctacaaaaaataaaaaaattagccgggtgcggtggctcatgcctgtaatcycagcactttgggaggctgaggcaggcagatcacctgaggtcaggagttcaagaccagcctggccaacatggttaaatcccatctctgctaaaaatataaaaattgggccgggcatggtgactcactcctgtaatcccagcactttgggaggctgaggcgggtggatcgtgaggtcaggagatcgagaccatcccggccaacatggtgaaacaccatctctactaaaaataccaaaaaaggccaggtgcggtggctcacgtctgtaatgccggcatttttggaggctgaggcaggtggatcacctaaggtcaggagttcgagaccagcctggccaacatggtgaaactccgtctttactaaaaatacaaaaattagctgggcatggtggcacatgcctgtaatcccagctactcaggaggctgaggtaagagaatcgtatgaacccgggaggctgaggttgcagtgagctgaaatmgcaccactgcactgcagcctgggtgacacagcgagactccatttaaaaaaaaaacccaaaaaacccaaaaattagctgggtgtggtggcgcgtgcctgtaattccagctactcgggaggctgagatacaggaattgcttgaacctgggaggcagaggttgcagtgagccgagatcgcaccattgcactccagcctgggtgacagagcaagactccgtctcagaaaaaaaaaaaaaaaaattagctgggcgtggtggcagacgcctgtaatcccagctactygggatgctaaggcaggagaattgcttgaacccaggaggcagaggttgcagtgagccaagatcacgtcattgcacaccaatctgggcaacaagagcgaaactccgtctcaaaaaaaaaaaaaaaaattagccagccgttgtagctcgtgcctgtagacttagctactcaggagactgaggtgggaggatcacttgagccagggaggttgaggccacagtgaaccatggttgagctgctgcactccagcctgggagacagagtaagacctgtctcaaaaaaacaaaactgaagtgaatagtggtctggtattgaggtgaggataactttggttcggacgtgttgagatatggagctggtgcttagattcttagagttggaatgtaggtgaggaagggagtctggaagtacgtattgagccatgaaaatagtactaaaagtgaacatagagaacagatactcaaggagcatccactggaggaggaaggagaggaaccattgaagaagatatgtggtagaggtaagaagatagaggtaagaagggaatataaagtgtaactgaaaccaagtagacggagagtgccaagcattgtgggtctaaagtggaattatttatttaatcaccttgagatgttactgggcttagaccgagaggtctccttttgccttgcttcaacttctctctgtagtgcagggcccagaagcaattcaagccccaaggctgaatcgataaataatcttatttttctgtagaacctattggtttggaaagatgtggtctagtgtagttaactgcagatcatatgatgtaatgtgtaactgcaaagcattttcacacatattgttcaattctcacagcaattccaattttatggatgagaaaattatatgtgaaataactctaaaagttgtgtaagttatggtgaacattttggtggtagtagtttttactatcactaattactgctatctattttgaatatttgaccaggtaattcatttttttgagagtggccgagattacaggcgtgtaccacaacatgcagctaacttttgtatttttgtagagacggggtttccccatgttggccaggctggtcttgaactcctgacctcaggtgatccgcccaacctcgcccccccagagtgctgggattataggcgtgaaccaccacggctagccaccaggctaaagtcctaaattcccaaatcatttattgtgttctgtaaatatcacaacactggccactagtttgagattttaaaattgaagttgaaaaatagtgttttttaaaaaaattaactgaatttaaaacgtaaaaaaaaaaaaaaaatccaggattactgtccttccgtggaagtataacaattggacttctatatgaattatatagtttctttttgttttcctttagcctgtgaattgtcaaagtgcagggaggaagcataatgtgaaaagagaatgggctttcaagtcaggcagtgctagattcagtttctagtacttatagctgcaggaaatcccacatgtggatctttggcaagttgcttaacctcttacaacttctgtttccttgtctataaaatggcaaaggtggctgggcacagtggctcacgcctgtaatcccaccactttgggaggccgaggctggtggatcacctgaggtcaggagtttgagaccagtctggccaacagggtgaaacctcgtttctactaaaaatacaaaaatttagctgggcatggtggcgtatgcctgtagtcccagctacttggaagactgaggcaggagaatcacttgaacccgggaggcggaggctgtagtgagccaagattgcgccactgcactccagcctgggtgacagagcaaaactctatctcaaaaataaataaataattaaataaaatggcaaaggtaatacaggttcactatcccttatccaaaatccttggaactagttgtattttggaattcagaattctggggatttttagaaaggtagcaccccggtagggtttggggcctgaaacctgtaatcaaacaccttaatattaaatatgagtggtcatactaagcaggataaatgaagactataaagagcctcacgttagttcaagttaaattttgccatcaaatgagttcaggtaaggttttgcctccaaataagttacaaaaaaaactttcggttttcagagctttatggatatcgcaatttcggataagggattatggacctgtacttcccttatagggttgttatgaagatttaaacaagataagctgaaaacacattacacagtgctgggtaggtattcaataagtattaatttttttttctcttggaaatgttggaagtttttgcttgtttagtaatttataattctggggttgtctttctttccctgaggagaaaccgttttaattttccttaaatcttatgatgggattagagaggggctagaggctgagtcttgagaatgctaggaaggggatgagaaagatagcaacagttgaggcttagagcttggcattagtaagcagtctggatttctaccaggcaggttttcaaagtaactgtagattgagctgaactggtgggggagtcatgctctaacttctctagagtcttaaaagaaaacctctgaccatcttgtcattgcttctttgtttgttcacagagtgacagaaggaagtcaaggcaccattatgactcggatgagaaatcagaaacaagagaaaatggtgttacagatkacctggatgctcccaaggccaaaaaatctaaaatgaaagagaagctaaatggagacactgaagaaggatttaatagactttcagatgaattctccaaatctcataagtcaagaagaaaagatctaccaaatggagatatagatgaatatgaaaaaaaatcaaagcgagtatcatctttagatacttctactcataaatcaagtgataataaactagaggaggtrtggaagctttttattttgcatttgacattgttgttgaactataggttgatttgaatttttttrggctaattagaattgattctataacatttcttgattagtgtctagtattcttagttgcactagagtctgtacaggtgaagcctgagccttttttcctttggcccttgtttatttcactgtatggcctttttcttggggcgaggtgggagcaatagttaaatttaaaccttttctgtacatttgggttcctaaagttattcggaattgcttgatggttatctacttgaatttcttttcttttttcttttttttttttttttgagtcagagtctctctctgtttctcaggctggactggaatggcacaatctcagctcatggcaacctctgcctcccgggttgaagcrattctcctgagtcagcctctcaagtagctgggattacgggcacgcaccaccatgcctggcaaatttttgtatttttagtagagacggtgtttctccatgttgatcaggctggtcttgaactcctgacctcaaagtgatccacctgtctcggcttcccaaattgctgggattacaggcatgagccaccacactgggctgataattagtaattctttatattatataaatacgataattgctgatattcatatacatttgagcttaatgcataatctttggggaaaaatgttgaatccttgtgttatggccyttttttttttaatttgtgaatttgctgtttggcaggaagcacatgtgtttgttgatctaaataaggtcctttaaatctgtatttctagcagtggaatgtatggcttgcttctcactttggtgggattttgcctggtaaaatctgtattataataggtttaacagtttattattttgtttagatcacatgagagttcaggaattctacttaaaggaatttatcctaaggagatgatgaagaggtgtgcagagctgtatgaataagtactcttatcatagtaatattgttgataataggaaaatatttaaacatcctaaatgtctgatagtagacatttggtttaaataaaacatactatagctgtataatagaatacagctatcccaaagggtatacaatagaaaaggtagtcattgtatcttgttaaaagaaaaaaataggctgggcgcagtggctcacgcctgtaatcccagcactttgggaggctgaggcaggtggatcacctgagatcaggagttccaagaccagcctgaccgacatggtgaaacctgtctctactaaatacaaaaaaattagttgggtgtggtggcgcatgcctgtaatcccagctacttgggaggctgaggcaggagaatcgcttgaacctgggaagtggaggttgcagtgagccgagattgcaccattgcactccagcctggtcaacaagagcgaaactccatctcaaaaaaaaaaaaaaaaaaaaaaagattataaaatggtatatacagtgtgattttatttctatttaaaaaattttatgtgcatagagtgaagactggaggagtatgtttcaaatatggctttagctgagtggattataaataatttttaaatttgtttctgtttcctctgtagtttttaaaatttcctttttttttttttttttttttgagatggggtctcactctgtcacctaggatggagtgcagtggtgtgatcatggctcactgcagcctcatcctcgctgggctcaggtgatcctcccacctcagcctcctgagtagctgggactataggcgtgtagcaccatgcctggctaatttgtgtatttttgggagaaatggtgtttcattcactatgttgcccagactggtcttgaactcctgggctcaagtaatccacccaccttggcctcccaaagtgctgggattacagacataaaccactgggctctgccagtttcaaaagtttctacaatgacagtgtattgtttatttttgtttgtttgtttgttttttatagagacaaggtctcactgtattgctcaggctagtcttgaactcctgggcttaagtgatcctaccaccttggcctcccaaaatgctggaattacaggcatgagccaccacgcctggccgacagtgtattatttttataattttttttatcataaaaaggtaacagcagcattgaagtttgtttaaatggcatgccatttgaatttgaaattattttttatctaattccaagtttgaaaattgttagtgtgtgtttctttaaacacatgaacaataaagcttactgggtagacacactgtttttgttctatgtgcacattagtatacaaagttttcaataaatgttaaatgataatctcatggtaacttgtatatatgttaaagaaatcttcaagcttacggtaactttctcttgtattagcaacctaaataagctttcaaacgctgtagaataaatttttaacttattttcagaaaaactttacattcctcattatatactttcttttagcttagtttataggcttgtgttaatctttataattttgtctacatctgtatgatttagatgaataaataacctttttggctgggcataatggcttatgcttgtaatcccagcagtttggaggccaaggtaggaggatctttttttttttcttgttcttcttttgagacagagtttcgctcttgttgccccggctggagtgccatggtgcaatctcggctcactacaacctctgcctcctgggttcaagcaattatcctgcctcagcctcccgagtagctgggattacaggcatgcgccaccatgcctggctaattttgtattgttagtagagacagggtttctccatgttggtcaggctggtcttgaactcctgacctcacatgatccacctgccttggcctcccaaagtgctgggattacgggcatgagccaccgcacctggccaggaggatctcttgaggccaggagtttaagatctgcctggataacatggtgagaccctgtctctacaaaaaataaaaaactaagtgagcatggtggcatgcgcctgtggtcctagctgcttgggaggctgaggttggtaggatttgagcccggaggttgaggccacagtgagctgtgatggtgccactgcactccaacctgggcaacagagtgggaccctgtttcaaaaaaaaaaaaaaagtgttccactaattttccttgtaagttaatctgtaaaaaattaaaaacagtaaatgaggaagagttgagtataaattatttaggccattgatttcatttttacagaccttaacacgtgaacagaaagaaggagccttctccaattttcctatttctgaagagactataaagcttctgaaaggtatgcagtttggttgttgttgttattgttgttgttttgagacagagcctcgctctgttgcccaggctggagtgcagtggggcagtcttggctcactgcaacctccgcctcctgggttcaagcgattctcctacctcagcctgctgagtagttgggattataggcgtgtgccaccatgcccggctaagtttcatatttttagtagagacgcagtttcactrtgttggtcaggctggtctcaaactcctgacctcctgatctgttccagttgggttaccaaagtgctgggattacaggcgtgagccaccacggctggcccaaaggtttgcagttttaatggatatgcaattaaaaatctatcactagattttgtaaaactcctgtgccttttctgaccaaaaggagaacataaaaagcatagagaagtagctcttstttaattgcacttacttttacatcatccttttcaatattctgccttgtttttagctttaagatttatatgcattcgtcaaaagtttagactaattttttagtaatgcttgtttgtggtaggaataactgtgtcaccaggtggcatgtctttaggcagacatagaagaattatgattgtcattttcaaatgaatatattttttyctaatgctagtcgtaaagaagtattttaattaaatctcattttacaggtcgaggggtaacatatctctttcctattcaagttaagacctttggtcctgtatatgaaggaaaagatttaatagctcaagcacggacaggaacaggaaagacattctcttttgccatccccttaattgaaagactccaaagaaatcaagaaacaattaaaaaaagccgctcaccaaaggtaatcgttatagggggtaaaagctttaaatgttactctaacagaaagggaaagaaagttacacgagtcctaagttctagtacccccaaaatagaaaagttagcgctgtggcataaaacaaaaatatgttgtttttcacaaaaagaaatttcaagcaaagttaaagtgaagtagtttttgcatatgaatgtgatgtgtatggatccatagatgtctttgataatttcatgaattataaagcyggtatatcttatttacagtttttatatttagttgacccttttcttctcttttcttcagtcctgacctttgcttttaaataaatgaattttctaaagaggtgttcatttatttgtcattcagtaaatgttcagcatcatttatttcagtgttacctttttttccctttagtatggaatacgtcatgaattttcatgtcatccttgtgcaggggtcatgctaatcttccctgtgtcattccaattttagcgtatgtgctgctgaagtgagcacacacagatggactttttaagaagagtattatagaaatgatactgctagtttatatattattggggtactagacatcttattttataaatgtaaaatcaaccaacagagaggactagtaaaatgtaagcctaaaatttgacctaaaaagctgtgtgcacttaaggtttgtaaaagtgaagaaaaaaatcagcatcataatatgaacaactgtatgactaaaagtaatttgttctttgtaagactcctgagtggtattataagagcaaattaacatacatacataaatataattaaatcataatagtcttggatcagctatcccaaatcaggttggctgtgttgacttacaggataaatatttttggagagttatgtttttcgggtgaaattaggaaaagactgaaataggacataggatataatctcaacactgctttttttttgttttgttttgttttttgttttttttaaagacagggtctctctctgttgcccaggatggagtacagtggggtgatcatggctcattgtagccatgaactcctgggctcaagcaattctctcttcctctcagtctctccagtaggtaggactgcaggcaggtgccaccacacttggctaattttttattttttgtagagttggggtctcattctgtagtccaggctggttttgaactcctggcctcaagtgatccttccaccttggcctcccaaggtgttgggattacaggtgtgagcctccacgcctggccccaaagctgccttaaaaagcttttgtattagaaagatgttactggagattccagctccgccatttctaggtgtttgattttgggcaagactttaattctctgagacacaagtctctcatttacgaaaatggtggcataatgccactcatgggtttttatgagaatcaaattagataattcctgtaaagcattagttcctagcacatggtgaacattcattcgtttaacatttttgagtttcctgtactgtaccaggcactgtttgaagtgtaaggaatacagtaacccaacctgacataaattcctgccttcatggagcttacattttattgggtgagatagacaatcagcaaataagtaaaatatcagtatcttaggtggtttaagtgctgaggagaaatgataaagaggggcagggggatatgaaaatgggcttgggaacctcactgaagagacctgaaggaagtaaggggggaatgtaataaatacatgctgctgttccttttgctatttgtgatgtgtctttaaatacttygacattaatgttgagattcctggttttaaatgcacctaaaaaaagtcttcttggttttaatttagatatgtctttagaaaagtatctttttgttttttaaacctcttgctcaggtacttgttttggctccaacaagggaactggcaaaccaagtagccaaagacttcaaagatataactaggaaactcagygtggcgtgtttttatggtggaacatcatatcaaagccaaagtgagtaaatatgtttgatagacgtgcaaaggcatatttgatactcatatttaaataaataatgtgaaagtttgaattttacatattggtggcatttctctcttctcacagttaatcatattcgaaatggtattgacatcttggttggaacacctggtcgtatcaaagaccatctgcagagtggccgattggatctttctaaactgcgacatgttgtgcttgatgaagtggatcagatgttagatttaggtttcgctgaacaagttgaagatattattcatgaatcctacaaaactggtatatcctaattcaaaataagcacattagcaattattgttcgatcttaaatgcaaacgagtttttatttaataatttttattgcagtgtcccctgcrttctaacaaaactaaaataatttggtatctgttctgtccttgaaaaagaaagtatgatagcatcattttaactattttcttagctttctgtgctttattctatttttttatagtcagtagttagatttactaactcattttattgatttctttgttcattgttcctgcttaaattctcactttccttttgggttcagttctcttcatattgtcccccagttttgcaagttgaaagttttaataattgcaatgaagtctgtgtgttaaaaattcaccccaagttttacatttttcattatttttttgaagcttgggaggatttttaagagcgggctacatcgtgggaaattaagaaaacatttgaattcttyttgtttatttaagattctgaagacaatcctcagactttacttttttctgcaacttgcccacagtgggtatacaaagttgcaaaaaaatacatgaaatccagatatgaacaggttgaccttgttggaaaaatgactcaaaaggctgcaactactgtggaagtaagtagctttctagcatgatagattttagcttttagttggtatttacttttgacatttgttgaagctaaatttaagttttgggtacctcttcatgcctaatcttccttttctgctcttagtaagacacctatatatttttatagtctgagactgagtagcagaatagaataaatagggggaaaaaaagcacgtgaataggcaagtcctaataggaaacacacaagcagccatagagacagatttgaagtgtttctttctttctctctttaaagccgctcaaaaacaaaaacaaaaaacaaaatatttacaacgtgacaaagaaggcgatttatattgactagaaaagaatagtgcggagataatttgttaaagctgaggtgaaaaaaagatagatcctcatcccattcccccaaaccaaaaaaatttctcaaagatttaaaaaattaagctgtaaaataacttaaagcagacgtaggtgaataaagagttttttgatttcaggaaagggaatgcttttctaacatagaagttgggctgagcatggtggctcacgcctgtaatcccagcactttgggaggccaaggcgggcagatcacttgaggtcaggagtgtgagaccagcctggccaatatggtgaaactctgtctctactaaaaatagaaaaattagccggcctggtggcgggcccctgtagtcccagctatttgggaggctgaggcatgagaatcacttgaacccaggaggtggaggttgcagtaagctgagattgcgccaccgtactccagcctgggtgacagagggagaccctgtctcaaaaaaaaaaaaaaaaaccacagaagtcagaagaagaatccataaaggaaaaggtttataattttgactccatgaaagttaaaccaatggtatgtttaaaaaaagaattagggccgggcgtggtggctcacgcctgtaatcccagcattttgggaggctgaggcaggcggataatgaggtcaggagatcgagaccatcctggctaacacggtgaaactccatttttactaaaaatacaaaaaattagccggtcatggtggcgggcgcctgtagttccagctactcgggaggctgaggcaggagaatggcgtgaatcygggaggtgaagcttgcagtgagccaagatcgcgccactgcactccagcttgggtgacagagcgagactctgtctcaaaaaaaaataaaagaaaaaaaaggctgggtgcrgtggctcacgcctgtattctgaacactttgggaggctgaggcgggcagatcacgaggtcaggagatcgagaccatcctggccaacatggcgatacctcgtctctattaaaaatacaaaaactagctgggtgtggtgacccgcacctgtaatcccagctacttaggaggctaaggcaggagaattgcttgaacccgggaggcggaggttgcagtgagccaagatcgtrccactgcactccartctggagacagagtgagacaacatctcaaaaaaaaaaaaaagaaaaaagaactaaaggtaatatttaccgtatttatgacaggcaactaggtaacatgtcatctttctatttaatagatgcatatatatgtgtatgtaggaaagactaggtgactaagtgaatagtagtatctgcagaatgtaatgcagtggttaaaaacaatcagtgataaaaaccaaattatacaatgatgtatacaaaaattacactattttaaaaaataaatagtgctaaatggattccttaggcatttatgtaaatatacaaacacaggttgaaagaataaacatcagataatgattacttctgggaaggggcatgctggatggtaaaaagaagctttgtgggccgggcgtggtagctcatgcctgtaatcccagcactctgggaggccgaggcgggtgaatcatgaggtcaggagttcgagaccagcctggccaacataatgaaaccctttctctactaaaaatacaaaaattggctgggcatagttgcgcacgcctgtagtcccaactactcggcaggctgaggcaggagaattgcttgaacccaggaggtgatagttgcggtgagccgagattgcgccactgcactccagcctggacaacagattgagactctgtctcaaaaaaaaaaaaaaaaaagaataagaaaaaagaagcttttttattttgtaatggttgaaagttttgcagtaagaatgtaaaatgtatagtaaaaaacagttgataagaacattttcaaacatataaaattgaatagtaaattgaatagaaagattgaatagtataaagaacatgatatacccattacctattaccagtctttaacaatgatcttttcttcacccctgcatttgaaacaatcccagtcatcattttatcttcaagtaattgtatgtatttccaaaatgataactaagggctctttaaaaccacagtcattatcagtagaagaaaaacagtaattttttttgagatggaatttcactcttgttgcctagtctgcagtgcaatggtgtgatctcagcaygctgcaacctccacctccctggttcaagtgattcctcctgcctcagcctcctgagtagctgggattacaggcgcccaccaccacacctggctaattttttgtatttttagtagagactgggttttgccatgttggccaggctggtttcgaaatcatgacctcaagtgatccgcctgccttggtctctcgaagtgctggggttacaggcgtgagccactgcgcctggcatagtaattctttaatatcattaaatacctagtgtgcacattgcccttgctgtcttttttaaatagtttgtttgaatctggatccaaatacaattcttgacgttgctactgattgatatgcgtcttaaacattttataatctatagttccttttttyttctttgcaattttctgttgaaaaaactcatttgttggccaggcgcagtggctcacacctataatcccagcactttgggaggacgaggatggtagatcacctgaggtcaggagttcgagaccagcctgaccaacatagtgaaaccctgtctctactaaaaatacaaaaattagcaaggcatggtggcacgtgcctgtagtcccagctacttgggaggctgagaaagaagaatcgcttgaaccaggaggcggaggttgcagtgagctgagatcgtgccactgaactctagcctgggcgacagtgtgagactccgtctcaaaaaacaacaaaaaaactcatttgccttatgagtttcccacagtctgttttgctgatttgcatccctgtggtttttatttttccttatttttttactgttaacaccactcaaagatgtggtgggttttcttgtttgttcgtgttgtgtttttgtttttgttttgagagtcttgctctgtcgccccggctgcagtgcagtgtggcatgatctcagctcattgcagcctccaccttccaggttcaagagattctcctgtcttagccacctgagtggctgggactacaggcatgcgccaccatgtccggctaatttttgtgtttttagtagagatgtagttttgccatgttggccaggctagtctggaagtcctcacctcacgtgatccacctgcctccggctcccaaagtgctgggattacaggtgtgagccactgtacctggcctccccgtaagtattttaacatacatatctttttttttttgagatggaatttcactcttgtcgcccaggctggagtgcagtggcgcagtctcagctcactgcaacctctgcctccggggttcaagcgattctcctgcctcagcctcctgagtagctgggattacaggcgtctgccaccatgcccagctaatttttgtatttttagtagagatggcgtttcaccacgttggccaggctggttcaaactcctgacctcaggtgatccacccgtctcggcctcccaaagtggtgggattacaggcatgagccactgcgccctgcctatatatatctttaactagagtgccatatttacagttttttaaattgaggtaaaattcacataactaaaactaaccattttaaagtatacagtgtcatatagtacatttacagtatacagccatcatttctatctagttccaaacattttcatcaccccagaaggaaacccaacaaccgttaaacagttactctccattccctccttttttttttttttttttttttttgagacagagtttagctctgttgcccaggctggagtgcagtggcctaattttggctcactgcaacctccacctcccgggttcaagcaattctccttactcagtctcccgagtagctgggactacaggtgcccatgactaagtttttgtatttttagtagagatggggtttcaccatgttccccaggctggtctcgaactcctgacctcaggtgatccgctggccttggcctcccaaagtgctgggattacaggcgtgagccactattcccagcctccattccctcctttctttatccgctgtcaaccactagtctgttttttgtctgtatggatatacctgttttggatatttcatgtacagtcatgtgctgcataacgatgttttggtcagtgatggaccatatatatgatggcatatgctcgatggtggtcccataagattaaaatgaatctgtcctatacaggtgtatcagtttttatcttttatgccatattcttactgtgccttttctatgtttagatatgtttagagacgcacatacttaccattgcctacagtgttcagtacagtaacatgctgtttaggtttgtagcctaggagcaataggacataccatatagcctaggtgcgtgtagtaggctataccctaggtttgtgtaagtacactctttgatgtttgcgtaatgatgaagctgcctaacaatacatttctcagaacatatccctgtcatgaagcaacgcatgactgtaaatgtaatcatacaatatgtgactttttatgtcttgtttcattcacttagcataatgtttttgaggttcattcatataatttttattatgtacaatgaaatgtaaaatcttgtgtacatttgcctatttttgaaaaattcatatgtgtgtaacccaaacctttatcatcatatcgaatattgccatcatcctggaaagttccctcatgccccgtcccagtcagtatccccagttcagagacaaccactgtttgatttttcttccacaattgattggttttgcctattctagaacttcatataaatggaatgatactgtatgtgctcattttctgtaagatgttattcggcattttttttaaggttcatattgttccatgtatatcagtagttggtttcttttaattgttgaatggtattctgtttgaatatactgcagtttgtttattctttcgtcagtttattgatgaccatttgtctatattgtttttaagtgctgttgaggagagtctttgtcttacagtctcccaggaaggctaattcttgaccagayagaaaaaatacacaagagaaatattttaaaataattttaatgaaacaaataatgtggyattttctttcttcaaagcatttggccatccagtgtcattggtctcagaggccagcagttattggagatgtccttcaagtctacagtgggtctgaagggagggctattattttctgtgagaccaagaagaatgtaactgaaatggccatgaatccacacataaaacaggtaagtctttttttcatgctttctctaattgaaattatggggatgaatcactgaacgaaaattatattgtcctttgtggaccagatttgatagtcattctcaaaactgagttgtaaggctgggcatggtggcccacacctgtaatcctgtgacctgataagtcaggatagaattttatcagttttgtttgtttgtcttgagacagggtctccctcttatgcccaggctggagtgcagtgggacaatcatggctcactgcattcttgacttcctgggctcaggtgattctcccaccccagcctcttgagtagctgggactacaggtgcgtgccacaatgcccagctcattttttgcgtattttgtagagataagatttcaccatgtagcccaggctggtcttgaactcctgggctcaagcaattccgccctccccttggcctgccgaaatgctgggattacaggtgtgagccatcacacctgacctctatcagattttatcagtttttttttaagactttgaaaatgtgatctggaaaatataaaagttgaaacaaaatgaatttctatgggtaagagagggtaatattttagagttgtgttacaaaactacaaatttttattaaattaataaatcagaatactaaatccatgtgtttttttctttcttaaaaaatatcttttggctgggcacggtagctcatggctgtaatcccagcactttgggaggctgaggtgggtggatcgcctgatgtcaggagttcaagaccagcctggtcaacatgttgaaaccccatctctactaaaaatataaaaattagccggtgtggtggtgggcgcctgtaatcccagctactcaggaggctaaggcaggagaattgcgtgaacccaggagttcagtgatgtagcggggagctgagattgtgccactacactccagcctggatgacagagtgagactccatctcaaaaaaaaaaaaaaaagaaagggaaaaaaaaaccttttaaagaaaatgtcaaacatggacagaagttggtagaatcatgtaaggaacccctatgtattcatccaccagcttcagtaattattttatctatatgctaacctacctactctttcagaagtattttgatgcaaaccctggatatcatattattatatccataaatgtttggttatgtatctctaaaaaggattttcaaaaaaaaaaaataacaatactgttatcacatctaaaaaattaatatttagaaatattaattcatttcacattatcaattgtcttacaaatggttattttcttttattgtttgttttcttgaatctgagtccaaataaggtttttacattgtgtgattattaagttgcttttaatatatggattactcctttatgtattttttgtagctttttttgtttgagaaactacattgccataaatctagagtattgcttccccatgatgtcatttagcatgttcctctgtcttccatattttctgaatattcaggtttgtttgtttgtttgtttagggcagaactacttcataggtggtgtacttccggcaggaggtatatatgtctagttctttttgtgatgctaacatccaccaataatcagtgccatcagtccttatgtcagtgtctctccagtcatttttgttgtttgtgacttgttattaagtagattcctgagaaagggcttatggaaacagtatcgcctattgataatatcttgtttgtgtctttatacctcaaaattattttggctctatataaaattcttggttcacattttctttccttcattgtcttaaatatgttactttactgtttttggaataaagcatcggtataaaaagtgagatgccagtctaatcttttttccttatatgtgattttcttaaaatcttttttctaagtgatttcctttaaaaatcggtagttttactagaatatattttggtggtgttctttgtcagtttttctgggtacgcagtgtacactttcaatttgtagtttcatatgtattttttaaaagtttcaacaaaattttcttgaattacaatttttagcatttggttttacagttgctttggttttcttctttaaggactcttgttgtgcatatattgactgtttgttttgaatctcccttgtcacatcaaatctttttcctctttttccttattcagttttcaaaatttctctctttttttttaagagacaggatcttgctgtgttgcccacatgggagtgcagtggctattcacagatgtaatcatggcacttgatagctttgagctcctgtagctgggactgtaggcatgcaccactacacatgcctcaaaatttcgcatttttaaaaaatctgttgtgtttattcagtcttttactctttctagtatagtcttaatttgtgaaaagttatcttttatttctacttctttcttgagttattttatctcattgaaaaactgaaaagtttttcttgatttttgttctttattacagcattaaaattttttcttttagcaggcatggtggctcacacctgtaatctcagcactctgggattctaagttgaggattgcttgagcccaggagttcaagaaaagcctgggcaatatagcaagaccctgtctctacaaaaaataaaaaaattagccagaggtggtggtgtgtgcctgtactcccagctgctcaggaggctgaggtgggagaacttcatgaggccaggagctagaggttacaatgagctgtgatcgtgatgctgtactctatcttgggtgacagagtatgaccctttctctctcttttttttttttttttgagagtctcctattgcccaggctggagtgtagtggtacaatctcggctcactgcaacctctgtctgcctcctgggttcaagcgactctcctgcctcagcctcctgagtagctgggactacaggcgcatgccaccacacccagctagtttttgtatttttagcagagacgggtttcaccatattggccaggctggtctcaaactcttgacctcgtgatctgcccgccttggcctcccaaagtgctggaattaattacaggtgtgagccaccgcacctggctgagtatgaccctttctcttaaaaaaaaaaaaaaaaaaaaattctgtttgtgtgtgtgtatatatacatataaaactttaaaaacttttatatattatttatatatttaatatatataatatatattttattttttttttcggagatggggtctctgtcacccaggctcaagtgcagtggcatgatcttggctcactgcagccttcacctcccaggttcaagtgatcctcccacctcagcctcctgagtacctgaaaccacaggtgcatgctaccatgcctggctaagtttcatttttgtagagatgggatytctctaagttgcccaggctgctctcagtcctgagctcaagtgatccacttgcctctgcctcccaaagtgctgggattacagtcgaaagccactgtgcccagccaatatatgatatatatgtatattttattttatttattatcttttaattttttgttgagacacagtttcactctatcagccaggctggagtgcagtggcaagatcccggctcactgcaaccctccgcctcttaggttcaagcgattcttatgggtcagcctccagagtagctgggattacaggtacacaccaccacacccggctaatttttgtatatttagtagagatggggtttcaccatgttgggcaggctggtctcgaactgctgacctcaagtgatcgttttrcctcggcttcccaaagtgctgggattatagacgtgagccaccatacccggccatatatgtttgtttgagttcattcacaatggtatgcttttatttgttttgtggataagcttttctagatcactttatttgaggagatagtctgcttttttttttttttttttttttttttgagacagagtcaagctctgtggcccaggctggagtgcagtagtgtgatgtcagctcactgtgacctctgcctcccaggttcaagcgattttcctgcctcagcatccacagtactacagtagctgggattagagttgctgggattatagtcggtggcaccacgcccagctaatttttgtattttttgtagagatggggtttcaccatgttgggcaggctggtctagaactcctgacctcaaatgatccacctgcctaggcctcccaaagtgctgggattacaggcatgagccaccgtgtctgccaaaattttttttttttaagagacagggtcccaccatgttgccagcgttggagtgccttggctattcacagacacaataatagcacactgcagcctctaactcctggccttaagggatcttctctcatcagcctcctgagtaactgggactacaggcatgtgccactgttcccagcttattctgcctcttattgtttttttccttcctaattactttctgtgagatttgactgtgatctcttctgttgctcatttttaaattaagttaaactttgaaccttagatgggaaggcattggtgagaatacttctggcgtcacagctctagagctgctgcttttgttatttttgttagtgcttaaaaatatagtctgtaaattatatctgagtaaagctgttaaaaaaaaaaggtctactttctagttctagctgtgtctttcctcatttttctctgtatctttttttttctttgatcctgttattcttggcatccttagtttagatcctctgtccagcagtttctcctcagtatggggctttgtcctggaaagtgagcattggctgttaatttagaaagtttttatagggcccagcttgctccartccctgcagaccttaactctggctcctcacaatcaccctcaagtatataaaaatcctcccaggttcagctgctgttgtcaacaatttgagaatatgccttccaggtagcttttcagtatgctttcaagatgtcagacctgaaagactgggtccctgaatcacctgttcttaggactagcaaattcccccacgtagatacaagaattatccttccctgctcatgtttttttttttttttttttttttttgagaaggagttctgctcttgttgcccagattggagtgcaatggtgcgatcttggctcaccacaacctctgcctcccgggttcaagtgattctcctgcctgagtctcccaagtagctgggatggcaggcatgcgccaccatgcccaactaatttttttttttttatttttagtagagacagggtttcttcatatttgtcaggctggtctcgaactctcgatctcagatgatccacccgcctcggcctcccaaagtgctgggattacaggcatgagccaccgcgcccagcctctgcttatgttttagaaatcatgagaccattttgtcagttatttgttacatgtgtcatctgtggatttttagttktgttatcctagttgatgtgtgttatgtgggaactagagactcaaagtcactgtcttccccagtgtcattttaactaattgtgtagcattagctttgatgtttaaatgtccagtataggccaggcatgcctgtaattctagcactttgggaggctgatgtgggaggatcatttgaggtcaggagtttgagaccagcctgggcagcataatgagacactgtctctataaaaagttaaaaattagccagggccagctgcaatggctcacgcctgtaatcctagcattttgggaggccgaggtaggcagattgcctgagctcagaagttcgagaccaccctgtgcaacatggtgaaacccggtctccactaaaatacaaaaaattagccaggtgtggtgatgcacacctgtagtcccagctgcgtgggaggccgaggcacgagaatcacttgagctagggaggcagaggttgcagtgagccgagatcgcgccattgcactccatcctgggcaacagagcaagactctgtctccaaaaaaaaaaaagattagccagttgtggtggcacgttcctgtattcctgtctacttgggaggctgaggcaagaggattgcctgagcccaagagttagaggttgcagtgagctatgaacatgacaccgcattccagcctgggcgacagagcgaaactccgtctcaaaaaacataaataaaataaaataaaataaataaagtcctttataaacagatagatggtaaatagtgaaagagtggtagagggtaattgatttacctttcttttcgttgctttaaaatattcagtagcggttgtcttgcagaagctgttttttaatcttgaagaaattgtcttgctacaaaggctgggggagaattcccctttcagtggacagtaatctgtttctgtgatttggagaatggaattctccatcctccattctgctgggtgactttgctatttagatagaaagtactagtagtatctcattatgagttatatgggattttatggattaactacagaatctgaatagttttttgtttttatttttaaattgtaatttacttgtaaaaagtcaagttttacttggtttcccccagaaacaaatgccttctaaattctaaacagctgggtttggtggtgcacctgtaatcccagctactcaggaggttggggcgggagaatcgattaagccccaggcaacacagcaagaacccactctctaaatgaatgaatgaatgaatcattaaacagtctctgtgtctcacacagagatacacacacacacacacacacacacacacacacttttggaaaaaaaaattattcaaaagttggagacctggaaaccatcactgataccatgaatgtagtatgttcctcttaggacaaattatcaagtaaaaaaaaccctgtgttctttttttttgagagagggtcttactccgtcgcccaggctgaagtgcagtggtgtgatcacggctcactgcagcctcagtctcccaggctccagtggttctcccacctcagcctcccaaccagctgggactacaggcatgcgccaccacacctggctaattttttattttttgtagagacagggtctccttgtgttacccaggctggtctcgaactcttagcctcaagcagtcctcccacctcggcctcccaaagtgctgggattacaggcatgagaaaaaaacctgtgttgcaattgaaaaattcactatgaaaaactgtccaacttatttatagtatatttgtttataactttttttcaaaaattagatgtttcttctcttgaaatatttttcttaacttgggttatatgataaccacacaggtttattttcttctttggctaacctttcccagtttctgttgaggtctttttatattcttgtctatactttaaatattggtattccttacagatctgattcttactctacatatttttcatggaggaaaaaagaatagtgattaatagcacagacttgggagtcagattggggtttaaatctcagttatgctacttactagcataattttgtacatacgtacatatgcacacatacttacgtacatatattgtcctgcttttaagaagtggtatttcaagtatctgcttttggtgaagaaaaagtaaattaaaaaaatrtatatttgccaagcatggtggcccatgcctattagcccagcactttgggaggccaaggcagaaagattgcttgagcccaggaatttgagactagcgtgggcatttcatttatatagtagatatatttttaaagggagtcttatgcatgaattaaacatcttaaaatgtattatggaaattgtataagcttcctatttaaagggatacttttgagctggccgccatggttcatgcctgtaattctagctactcaggagactgaggtgggaggatctcttagcccagtattttgaggttgtaatgagctatgattttgccattgcaatgtaggttgggcgacagagcaagattccatctctttaaaatamatgaataataaaaggatgtttttgaaattaaaagaatttccctgggaagccaagacaggaaaatttcttgaggccaggcattcaaaagcagcatggaaacatagcaagaatctgtctctacaaaaaataaaaaaattgcctaggtgtggtgggacacacctgtggtccaagctactgaggaggctgaggtgggaagcatttcttgagtctaggaggtcgaggctacagtgagcaatgatcatgccactgcactccaccctgggcgaccgagtgagaccctgtctccataataaataaataaaatttaaaaggtggtattaaaaattactttcttttttaccattttaagatttaggtgggccaggcacgatggcttacatctgtaatcccagcactttgggaggccaaggcaggaggatcacttgagctcaggagtttaaaaccagcctgggcaacatagtgagacttcatctctatattattttttaaaaaattgtttatttaaagcattttgcgtagtgcatttcttttcttgaagcaaggagtcaattagtataggaatatagaagtatagatatgtatagataggtctaatcactcctgtggctccagtcattgagtatatggtaatgatacccaaatctttttctcactgggatctgcctcaagaatactagacctactagccacagacacaccaacctttatgttcctaaacctaaattaattaactttctacactcctatacccactctgtctccagcattccctagggctaaatmatacatctacccattgcttaaaccagaaatttatgtattattcttgaatttattccttacccttggccatccagccaactacatagtatttttggattatatctcctatggtttaaagtgtcccatttatttcttttttcttttctttttttttgagacggagtcttgctctttcaccaggctggagtgcagtggcgcgatctcggctcactgcaaccaccacctcctgggttcaagcgattctcctgcgtcagcctcccgaagcttgtattacaggcgtgtgccaccacgcctcgctaatttttgtatttttagtggagagggggttttgccatgttggccaggctggtctggaactcctgacctcaagcggtccacccacctccgtctcccacagtactgggattacaggtatgagccactatgcccagcctggtcccttccttccttccttccttccttccttccttccttccttccttcctytctctctctctctctttctttctctttctttctttccttccttccttccttcyttccttctttccttcctttcctttctttccttcctttcctttctttcctttcttycttcctttctttccttcttttctttcttttctttccagatggagtttcactcttgttgcccaggctggagtgcaatgttgtgatcttggctcactgcaacctccacctcctgggttcaagtgattctgctgcctcagcctcctgagaagctgggactacaggcgtgcaccaccacacccagctaatttttgtatttttagtagagacgaggtttcaccattttggccaggatagtctcaatcccttgacctcatgatccgcccaccttgctctcccaaagtgctgggattacaggcatgagccactgygcctggcctctttttttttttttttttttgagatggagtctcactgtgtcgcccagactggagtgcagtggtgcgatgtcgactcactgaaacctccgtcctctgcccccgggttcaagtgattctcctgcctcagcctccctagtagctgggattacaggtgtgcaacaccatacccggctaatttttgtatttttagtggagacggggttttgccatgttggccaggctggtctggaactcctgacctcaagtgatccgcccactttggcttcccaaagtactgggattacaggtgtgagccactgtgcccagcctggtccctttcttccttccttccttccttycttttccttcctttcctttcccttccttccttccttcctttctttcctttccttttttttttttttttttttttgatggagtttcgctcttgtcgcccaagctggagtacgatgatgtgatcccagctcactgcaacttctgcctcccgggttcaagcgattctcctacctcagcctcctgagtagctgggattacaggtgcctgccatcatgcctggctaatttttgtatttttagtagagacggggtttcaccacattggccagkctggtctcaaactcctgacctcaggtaatccacccgccttgcccttccaaagtgctgggattataggcgtgagccaccgtgctcagccttcatttatttcttacaccagttgcagaagctaaacatctgagaatcatgtataatgtatctctttcctttatacatcatttctactcccttgagtatgtccttccaatttcatcaactaatagttcttgaattcagttatggtgtagcctctacttacctttccagcctcatcttacacttccctctcattttttcattttgtgcacacactccatacatgccatggttttgttttttttgggggtggggagacagggtctcactctgtcccccagcctggagtacagtggcacaatggcttattggagcctcaactgcgtgggccaaagtgatcctcccacctcagcctcccaagtagctgggacgacacgtatgtgcccctacagctggctaactttttattttttatagagatggaatatccttacatagcccaggctggtattgaactactgggctccagccatctcccgctttggcctcccaaagtgctgggattacaggcatgagccaccatgctggtcagctcttgaatttgtagtctaccttgcctagcaactcctactcatccttcagatctcagtccaaagcatcactttttagggaatcctttcttgccccaagctaggtcagattgtcctcttataaagcctcattgcctcttagacccgtgcatcatccattacattcattgtctaaatttatttgtggtcctaattatttgattaatgtccatctttctgaccaggatataaagactatgaggacagaagcagtcttatttttgttcacctttttatccctagtgcccaacatgttgtaggtcattattatatttgtggagtaaataggtggtcattgccaccatcttaggccaccgatamcctctttatttcctttttcagaaacagggtcttgctctgtcacccaggctggtgggtgggtgacggatcattaaaaaaaaaaaatatatatatatatatatatgtatatatatatayacacacacacacacacacacacacacacacaattttttttttgagatggaattttgctctgttgcccaggctggagtgcagtggcacagtctcgggtcactgcaacctctgcctcccggtttccagtgattctcctgcctcagcctcccaagtagctaggattacaggcgcccgccaccacacccggctacttttttagtagagacggggtctcaccatgttggtctcgaactcctgacctcaggtgatccacctacctcggcctcccaaagtgctaggattacaggcatgagccactgtgcctggtcgtataatttaatatgttcatgatatttttctgcttataatcattcagttgtttcatattgtcctcaggataaagttcatattctattccaatctcatctctcactccctaacccctcatccccgctcccttttcagtctgttccagcagtgctcaaatatttgtaggttccactccccattctttatgtatgatatttcttctaccaggaactccctagccttctgcyccttcttttacctagtagttccttatgatgttaggtctcagcttcagtgctgctttcccctcaaacaagactgagttagatttccctcttaagtattcctgtaacactctgaacctatacctgtgatagcacacatcatactgtattgaagatgcctgtcagctggttgtcccagagccatttctttatgaatgttctggaaccaggtataatccaggcagatagcaagtgctcactgaattcattcatgtatatgttaagctatttagataccaaggctgaaatactgttggggttaaattactgttatgaacttctgttttttgagacagagtctcactctgccacccaggctagagtgcagtggagcgattacggctcactgcaacttttacctcctgggttcaaatgattctcctgccttaacctctcgagtagctgggattacaggcatgcaccaccatacctggctaatctttgtatttttagtagagatgaggtttcaccatgttggccaggctggtcttgaactcctgacttcaagtgatccacccacgtcagcctcccaaagtgctgggattacaggcatgagccactgagcctggcctgatcattgttatgaactttttgactttaatatagtggccaggaatactaggaagtgtatttataataccaggaaatttgcagcagagatgaagatctacctaatataaataggttcagtgtcactaatgcagcagagatgaagatctacctaatataaataggttcagtgtcactaaaaattacagacatgtaaattaaaacaacattgggaaattatttttgcctattaaattcacaaagattacaatgatttataatatacacaagctgggtagggtatgttgaaataaatactcatagagtattgaagaataaaaggtacacaactttttttataatacagttttttaaataatacagtttctgttaaaatgctacatgttcataatttttgacccagaaattcaacttctagatatgtatcctactgaaatatacagatactgaggcatccagagatacaagtacaaagttacaaagttgttcattgcaacattgtttgtttgttttttttttttttgagatgaagcttcactcttgtcccccaggctggagtgcaatggcacgatctcagctcactgcaacctccacctccygggttcaagctattctcctgtctcagcctcccaagtagctggaattacaggtgcctgtcactgcgcctagctaattttttgtatttttagtagagacagagtttcaccatgttggccaggctggtctcaaactcctgacctcgggtgatctgcctgtctcggcctcccagagtgctgggattacaggtgtgagccaccatgcccggcccattgcagcattgtttctaaaggtgaaaatgtgaatacagcccaaaagttcatcagtaggatattgctaaaatagatgctggtgcatccatatgaataaattatatacagtttaaaaaaattaagtagcattttatctatagatgtggatagctaagatacactaaatttatcaagtaggttacaaaaccctacctatgtaatatccacgttataaataaatacataaagtcatagtatatgctagtgtaatgtgagtatgtgtgtattaaaaaaaaaaagtggccgggtgtggtggctcacgcctgtaatcccagcactttgggaggcagaggctggcggatcacctgaggtcagcgagttcaagaccagcctgatcaacatggtgaaaccctgtttctactaaaaatacaaaaattagctgggcatagtggcaggcacctgtaatcccagctactcgggaggctgaggtaggagaatcgcttgaacctgggaggtagaggttgcagtgagccaagatcgctccattgcactccagcctgggcaataagagcaaaactctgtctaaaaaaaaaaaaaaatctgacagaatatttaccaaactcttagcagtgaattatttctaagtcactagtattagggaagcttttacattttatgttaaatattttctgtcatgtttgactttttttttttacagtaagcatgcattgttaaaatcatcaaagtaagatttaaaaacatgcaaaaggagcacagactagatgttgttgtgctatcagttgcaagtatgagctgtacacttaattttctccccctttctcaaatagaatgcccagtgtttacatggggacattgcacagtcacaaagagaaattacactaaaaggcttcagagaaggtagttttaaagttttggtggcaaccaatgtggctgcccgtggtttggacattcctgaagttgacctggtgattcaaagttctcctcctcaggtaggaaatgggatttgatttgggaaaaataagagcaattttataaattcccatttaatttacaacatattgcttgggatgtgaaaaatatgtcatctcttcttgctcttagccattttttgttagtgtgctattaaatttatcagattctgatacttttgcagatgattaactctattgtttgtatttgaagcatggagcaacaaaatcaggcagagaattacaaaaagttgccataaagaaacctgggatgaggtggattaaaaggttttaaatcatattgcctttaccccaaaatccacacatataaattgtttggaatrttgaaaagggcaacaggattgaaataaatatattattattaacattattatttggattccrgaatgactgcaacttgctagatttttaaaaaatattaccttttataatctttaggatgttgagtcctatatccatcgctctggacgcacaggtagagctggacggacagggatttgtatatgtttttatcaaccaagagaaagaggtcaactaagatatgtggaacaaaaagcagtaagtagagttaaattatttcaggcttattgtctaaatggtgccttaaaagagagctcttcttatatttattcttacaagtaggtcttcataacttttctcagtttaagctgcatttggctgtgaagcctgtggagatctaaatttatattagcttcaagactttaatacagcttttattgtgaagacagtggagctgactttctcatcttttccttgaatttctctcttcatactaaaatcagaagtgcattgtgatttcagtacttcttagtccagcattgtaaatgggtgactaaaagattgtcttggtataatagttaagattcttttaagtatggtacaatagacagtttctaaagaaactgtacattttctgtggtctggattttttgtggtatttcacattttttcctatttttatatgtgtttttatatgcaatttcatatactttgtaaaatgagatagtgtaataaggaaaaaagctgatagatttaaacatctgttttgttttgtttttttttcaaatcaggcttgttttacaagtgaaattccatgattgtaactaaggggcaattcaaaaaattatttttctctttctgaaatttgtaattgatgatttatgagaaaaaaaagatcttggctgggtgcagtcactcacgcctgtaatcccagcactttgggaggcggagatgggcagatcacttgaggtcaggagtttgagaccagcctgcccaacatggtgaaaccccatctctactaaaaataccaaaattagctgggcatggtggtagacacctgtaatcccagctactatggaggctgaggcaggagaattgcttgagcccaggaggtggaggttgcagtgagccaagatcacgccactgcactccagcctgggcaacagagcaagactctgtgtcaaaacaaaaacaaaaacaaaaacaaaaaagataaaactgatcttttaatctgctagggctatgaaatctttaaatgcaagaaatagaaattcaacgaactattaawatattaatttaggaattaattgtaaagacttccatttttctttaatgtaactctttcattttcagggaattacttttaaacgtgtaggtgttccttctacaatggatttagttaaatctaaaagcatggatgccatcaggtatgctttctgaacttgctgaataattgtttcttttgtattaggctattcatctgtaagctctcccagttcaaatagcagaaaattttaccaccagttttaccagcagacatttagttatattaaaatataaaacagtggctcatgcctgtaattccagcactttgggaggccgaggcgggcagctcatgaggtcaggagattgagaccatcctggctaacacggtgaaaccctatctctactaaaaaaatacaaaaaattagccaggcgtggtggtgggcgcctgtagtcccagctacttgggaggctggagcaggagaatggtgtgaacctggggggcggagcttgcagggaatcgagagtgcaccactgcattccagcctgggcgacagagcaagactctgtctcaaaaaaaaaaaaaaaaaaaaaaaaaaaaaatatatatatatatatatataaaatgtggctgggcactgtggtgcacgcctgtaattccagcacttcgggaggctgaggtgggcagattgcttgagcttaggagtttgagactagcttggccaacatggcgaaaccttgtctctacaaaaaatacaaagattagccaggagtggtggcgcgtgcacctgtagtcccagctacttggaaggctgaggtgggaggattgcttgagcccgggaggttgaggctgcagtgagccaagatcgtgccagtgcgctccagactgggtgacagagcaaggctctatctcaaaaaaaaaaaattactccttctttttcccatttttcttcttatcttttattttttccctatgtcttgaccaagaatactatttttaaaccataggtctctggcttccgtttcttatgctgctgttgattttttccgaccatcagctcagagactgatagaagagaaaggtgcagtggatgcattggctgcagctttagcccacatttctggtgcatcaagytttgaaccacgatctttgatcacctctgataaggtagaaatctgtgagaaaattgtacatgagtgggaaaaggttaaaattgaacatagkaaatattgtagtgaattattgtgctttttgtgcagaaaaaaactgttttgctctatgagaaactggtctccttattttcctctactccctaataaatccttttttgacaatcacctcttccaaatttttcaaacccacagaaaaactgaaagaataatgcagtaaccacatacgatccacctagattcaactgttaaaagtcygtatcatgtgctttatatccttttttagctctaatttgtaattaaaaaaaaatgacatgtaataattgtacatatttatagggtatgtggtgatgtttcagtacatccgtacataccatgtataggtatcagatcaggatcattagcgtatccatcgtctaaacatttatcatttctttgttttaggaaccattcaatatcttccttcttgctttataactttataagtttttttttttttttttttgagattgagtcttgttctgttacccaggctggagtgcaattacgtgatcttggttcactgcaacctctccctcccgggttcaagcaattctcctgtctcaccctcctgagtagctgggactacaggcgcacgccaccatgcctggctaatttttgtatttttagtagagacagggtttcaccatattggtcaggctggtctcaaactcctgacctcaggtgatctgccctcctcagcctcccaaagtgctgggattacaggcgtgagccacctcacccggcctgtattttttttctaaatcatttgaaagtaagtcgaaacaccgtgatatcatccctaaatatttcaacatgcatcctctgagaataaggatattctgctacataaccacaatataataagctcatctgtgaaaattaatgatagttctgtatcatcatctaatatttagtttatatccatttttttctcattatcctgaaaatgtctgtctgtctgggtatttggagagaaatataggaaatgctcactttgcacagacctttgttaactgaaacttgtatcccagaacctacatttcattttgtaagtttccatggaatcctgcaaagtaagaaatagactctgcacaattaacacagtagcatgcaaagtaagtaagaaatgcctgtgtgtgtgtggaggggttgtgtaagtgtaacaccatctgaactggcctgctgccagattcgtatcacatgtcaaaacataccacaccagaaccattggtgcaggtagctcagagattttttacttattcaagtataagtgaggggagtttcttggtgaagagaattttaaataagagttctgttatgtctgagtggagagagtgagtgagcgaacctggtcctggagacatctataagactagagcctgctggtgggattttcaaataataacaaaacagactaatttgggcagcacatccctgtgawggggaggaggaaacaaaaagggcagggcaggttcacttggatgtgacttatttggtgtagcacaaatgaatgctgctggggtatctgatggtttctacctggtaggtgwtaatagtttagctaaatgtcattttgctttgagtgacttattgggctccattccgtttatccatatgtgtacatataccyatttgtatgtatgtttttaaaaattcaggacctagttaagttttacatgttacatttggtattatgtctctttagtctcttttagtctggaactgttttctcatctttttaatttttttctgatattgatttggtgaagagtcttggtcggttgtttggtagaatatctcactgtctggatttgtccgaatctcttcaagcatcatttaacttttgcctttatcctcttttaaactgaaagtaatatcaaagcttgacttttatatttaggtgaaatgtttttggcaagggtactttatagttaatatgtacctcatattgcatcacatcaagaggcataaaatgttaggttgttccagtactagtaatgcttaatttgcatttgtttaagatggaaactgccatattgtaaaggtgtattttactctctgtaattagtaacttgtggggtgatactttagcattgagcagatatcctatccctagtaacccaccaaatgcttaagacagtatttaaaacatatttctttagaaaataytgagatttgagctaagaagtacctaagaagttatttagtctcaactctcatccaatgaagaatccctctttggcagatgggtcatttaatctctgattaaatatcttagaaacagggtgttagtggctttaaatttctttcatgggttaaaccaaaatccagtctttatcaggaatgtcctataggcttttcctcttgctatcttcttgacrtcatgtcttatcactctcccctttcttatttcagccaccctaacctatttggttttcctcagacataaacttaactattacacaaggcctttgtacatactttcattgtcttgaatgttcttcccctctaataaccatgttgcttcctcctttacttcattctggtctctgctcaaatatcataccagagaggtctttcttgatcactctaaaatagcttactcctccctatactctttgttccctaagccctgctttattcctgttcgtgacgcttattactatatgatattccatatatttgcttttttgtttactgtgtacccccccacccaaccccacatacaggtgtaggtacatgcacatgcactagaatttactgtccatgagagaaaggactacttactgctgaatctctagcacctagtacagtctgtggcacatacgtagggcgcactcaataaatatttgtttgctgaatgcatccccatatcttcttaatgttgattcttttgctgttagtgaagctttacagaacaaataatttttgcttatgtaacactccttcaaaagtttaaagaaattgttcaggcatggtggcttatgcctgtaatcctagcactttgggaggctgaagcaggcagatcacttgagtccaggggttcaagaccaacctgggcaaccccgtctctactaaaaatacaaaaattagcacggcatggtggcacgcacctgtagttccagatgcttgtggggctgaggtgagaagactgcttgagcccagaaggttgagggtgcagtgagctgagatcgtgccactgcattccaacctgggtgacagagcgagaccctgtcttaaaaaaaaaaaaaaaaggttaaagaaatttatgttgtatttactttttattttttttttgagacagggtctagttctgtcacccaggctggagtgcagtggtgcaatctcggctcactgcaacctctgcctcctgggctcctgggctcaagcctcccaagtagctgggactgtaggagtaggccaccatgcctggctaattattattattattatttttgtagcaatggttatttcaccatgttgcccaggctggtctcaaactcctgggctcaagtgaccctcccgcctcggtttcctaaagtgctgagattacaggtgtgagccaccacacccagccaaggttttcgttccaagctgactttgactccttcaacatttccttaattcttcactaccttgttgtctttcttggctctggtttgcttaattcttaattctctcttaaagcataatggttagaattaaatagagtcttacagcaatacataggatagtactttcaattatctataaacactattcttctaataatgtagtttcaaaaaaattttttagctgcaatgttatacttttggctcataagaaatgcacagttaagtcttgaaggattatagagttagaatttcattgtactgctgctgatttatttccaaacataatgtggtttttattccttaaggggtttgtgaccatgactctggaaagcctagaggaaatacaggatgtcagctgtgcttggaaagaacttaacagaaagctgagtagtaatgcagtgtctcagattaccagaatgtgcctcctgaaaggraatatggtaggcttttccagacaattaaaaagctttttaatcaactaccccaaatgtttacaaacactagcaaattttgttctttctctttgaagcctaatggcatgaataatgctgttttttctctgttagtttgtttccagttataaatttggggcattatatatgtaacccattcctccagagctgtaagtcattctgttcagtttgactatctaatacccaaattatctaagtttctgccacatactgtatgtggttgtgtacatgtgtttattctctttttattttttaaattttatttatttacgactttatagtgatgaggtctcactatttgcccaggctggtcttgaactctggggctcaagtgatcctcctaccttggactcccaaagtactgggattataggtgtgagccactgcacctggcctttttgkattattattattattatttttatttttgagacagagtttcactcttgtcgcccaggctagagtgcaatggcacaatctcggctcactgcaacctatgcctcctgggttcaagcagttctcctgcctcagcctcctgagtagctgagattacaggtgcccgccactatgcccagctaatttttgtatttttagtagagatggggtttcagcatgttggccaggctggtctcgcactcctgacctcaggtgatcctcccgcttctgcctcccaaagtgctgggattacaggcgtgagccaccataccctgyccatgttattattattgtgattattatttggtaaagatgggattttgccatgttgcccaggctggtcttgaactcctgagctcaagggattcacctgcctcagcctcccaaagtgctgggattacaggcttgagccactgcacctggcatgtgtgtttattttgtaagactaagtagcttatgattgcagtagttaaacagctctataattttgaggacatgcagtttggtttttaaatggcctgctctttgttgttaatgaattaatgatatgaattaaataaatactttaatacatttatatagcaaaattaaaactgtaatcttgtgactgatttcttctaatggttttgaaaaatgatgttatgttattaatttaactttactgcataggttcattctagcttggaatttattaactagattgtttattgcaaataatcatctctctcaaagtttaatattacttgccttgtaaaaggatgtggggcaagtatgagacaaatatatactttcaggaaaaaaatgtagaggggagggaaaaaatagcaagatccataggccaaactagttgctatacttgagtattaaattaactttcagcttattgacaactaagaccatagaagaaacatcttgggttatataattcttattatctaacaaacattgcagcttttttcttttttttttgagacagggtctcaccctgtcacccaggctggagtgcagtggcgtgatcttagctcactgccacctccgcctcccaggcccaagcgatcctcccacctcagcctcctgagtagctgggactacagtcatgcatcaccacacctggataatttttgcattttttttgtagagatggagttttccctatgttgcccaggctggtcttgatcgaattcctggactcaaacaatctgtccaccttggcctcccaaagtgctgggattacaggcatgaactaccacgcctggcccattgtagctctttgtaaatgagactttctatcattaaattttaaaagaaatttattagaaggatcattttacaagggacatggaacaacatatagggtctacacaaactcttctagagaatactgtagattcttagcagtagttgtaaattcttattggatactgtgtttagttaytttttaaatttagaaaatacattaagcagccactgagtcatgcattattagtaaaacaaaaaaaatctacacatatgcatctaatttaaaatgttttgctttgttttgcttttagggtgtttgctttgatgttcctacaactgagtcagaaaggttacaggtatttttaaaattttatcttttaaatggttgagtacattctctaacatttagattgggatattttgggaaacatagtcacaatgtcattatcatgcctaaatcaatgaggaattccttaatataaaataaccagtctgtctcaaacttaaatttatttttaaagagatggagtctctctcaggctggagtgcagtggcacaatcatagctcatttgcaaccttgaattcctgggctcaagtgatcctcccacctcagactcccaagtagctagaactacaaggcgtgtgccactatgtctggctaacatgagccaccatgcccggataattttttttttctttttgtatttttagtaaagatggggtttctccatgttggtcaggctgggctgaaactcccgacctcaggtgatccacccaccttggcctcccaaagtgctgggattacaggcgtgagccaccgctcctggccccctgcctggctaatttttttaaaaaatttttgtagaaacagagtctgtagcacaggttggtcttgaactcctggcctcaagtgatcctcccactttgaccttccaaagtgttgggaatattggtgtgagccaccataccyagtaaaaaatttgttattataaatcatttcaaacatattttttagatgagggacttgtataatgaatctccatgtacccaacactcagcttcaacaattatcagttcatagccagttttgtttcatttctgtgtccatctacttacccacttttctgcattcttttgaaataaattctaggtattctatcatttcaaccataaatatttgcatatttctaaatattaatgactttaaaaaagaccttatcataataccataattaaaytcccccaaaataattccttaatatcatccaattttatttaaatttttccatttgtttcctaaactttttaaatacagggtccataaagctcatagattgtaatttgatgtttcttaagtctcttttaatctataggttcttcctcctccctctctctcttttaaaaaagtattcctgtgtatactttactgtgtaaagtatctttatctgttgaagaaggaagttgtctactggattcccataatgaagaatttgtctattgtatctcagtacatacttatatacctactttgaaacaaaaatgagtattttgctttcgaagtctttttaaaaattcagaatatgttaaagacacatttttgtgtcaataacacagttctttttttcttttctttttatattttaattttttgtttgtttattttgagacagaatctcgctctgctgccaggctgcagtgcagtggtgtgatctcagctcactgcaacctccgcctcccgggttcaagcgattctcctccctcagcctcccgagtagctgggactacaggcaaatgccaccacgcccagctaatttttgtatttttagtagagacggggtttcaccatgttggccaggatggtcttgatctcttgacctcatgatccgcccgcctcggcctcccaaagtgctgggattatagtcttgagccactgtgcctggcctttctttttatatttttaaatagagatggggtcttgctatgttgcccaggctggtctcaaactcttggtcccaagtgatcctcccaaagtattgggttcacaggtgtgagccattgcacccagccacagttacttatttttaatgactcccaggcatttggccatttgggtggctggttttcttaaccagtgtcctattttctgaaatttagattatttctaataatttactattattaggactgccctaaacattggtatagcgaattctttatgcattgccatgtttatctctttaagatgagtttttaaatgtgattgcttggccaaaaggtttgtgcctttttttttactttggttatatattgccaaacccaccagtggaatgttcgtttgtcttttcccaaaaagtaccagtattggaaagaaagatagccttagcaacagggtgtcttaataacaacattttttttttttctttgagacaagagtcactctgtcgcccaggctggagtgtagtggcacgatctcggctcactgcaacctctgcctcccaggttcaagcaattctcctgcgtcagcttcccgagtaactgggattacaggcgcccaccaccatgcccggctaatttttgtatttctagtagagttggagttttaccacgttggccaggctggtctcgaacttctgacctcaagtgatctgcccgcctcggcctcccaaagtgctgggattacagacatgagctactgtgcccggccaataacaactttccttgccaactcatgatcacaataaggaacagttagtgtagcaagatataaaatagtgatgctcttatgggttactgatttgtatatcttcacttgtttactccaatatcaaagtgtttccagtggctacattttttagtccttggctggtgttgacttgtatttaatctccatcatgggctcttttactttttgcttgtcagtatacctgctgaaaacaacgcactacttattaatggcctgtctgctttgtgctgagataccaaatagtgctgttttagaatgtagaaactgagtataatgtatatttttgtacatttatttaattagtatatttatttaattagtaatacatagtatagttttagaatgtatatttattagaatagaatatatttagaatgttagtattagaatagaatgtatatttagaatgttagaatttatttagaatgtatatttagaatgtatatttatagaatgtatttaattagtacatktaattagtaatacatagtttaattttagaatgtataaactgagtatgaatttatgatctcgaaaattgaaaatatttttgcttattttctggttttcatttttgttccagatacgttaacagaatagatggcctttagctaatagatatgaaaaaggtgtcttcttgtacttaacatgtttgcttatggtttctattttgcatttatattaatcctgtaaattcccctaacaggcagagtggcatgattccgactggatactctcagtgccagccaaattacctgaaattgaagaatattatgatggaaacacatcttctaattccagacagaggagtggctggtcaagtggtcgatcaggccggtcaggccggtcaggtggtcgatctggcggccggtcaggtagacagagtcgacaaggaagtcgctcaggaagtcgacaagatggtagaagacgaagtgggaatagaaatcgatcaagaagtgggggccacaaacggagttttgactgagtatttgatagttaatctaccagtgtgagcttgcctatttctgcctaatcatgtacattatccaccaaaaattaggtcatcatagttgaggtatgtgtctgctatttgcaaagaagttggtcgtatttttttaaaaagtatttcacaagaatggaacaaatctacttatccagttatacctttgaataaaaaaacctccttttattgtctcttttcacttatgtgttaagaattttctcaatgtaatctcaaaaatttctttaaaaacttggcaatcaggccaggtgcggtggctcatggctgtaatcccagcactttgggaggctgtgttgggcggatcacttgaggtcaggagtttgaaaccagcctgaccaacatggtgaaaccccaactctattaaaaatacaaaaattagctggacatggtggtacatgcctgtaatcccagctactcgggaggccgaggcaggagaatcacttgaacccaggaggtagaggttgcagtgagccgagatcatgtcactgcactccagcctgggcaatagagtgagactctgtctcaaaacaaacaaacaaaacttggtagtcaagctaatcataacataagattacttgcattttacaaaatgtgatgtatttgtattcatataattcctcccataggttatgtgataaaaataagaaattcccttctacattaaagggctgtgtaaactgttgacatggttagttaggtgtatcattttagtctagacacagttaattaaaagagtgtgccaacagtgcatactcattaatttattccacagatatttattgaatttctactatgtttccatcactatgctaaccactggggagtatagttgtgaataaggcataatcactatccttaaggaacttagagtcaattattacagactaacaaataaaagctaagacagtggtaggtatggtatgctaaggacctacttggggtacacctgaccagttttagcagtcaggaaggccttttaaaagtgatacccaacagagaaataaagaagtatccatttagccacatgtatgtacaggtgggaagaggagtttagaagggagagggcttgcaggcagagagaacaacatatgcggacaccagaggcaaagaatagcatggtaagtctgaggtttccatatgatagagaacaggaataagagactggttcagtatttaacagggacagattttaaaggccttatgtacattgttaaggagtttaaagcttttcttgaagacagtgggtaatcatttaagggcttaaagtaaggagtaacatgatttgatttacattttagaaagaatgctggccacactgaagagactggattggagaaaagccagactggaggcctggagacctcttaagatgccataggagtaatctatggtagagatgctggtgatctgaactaatgctaagtaacatattttgagggatgagaactgaggcacttgagaggttgttacttgtccagaatcatgcagctggatgatgtgaggtaaatgaggatttgaacccagaaaaatgtctagcttctgaaccagcactcttaaccactgcactaaatagtggcagtggacactgagaaacatggataggtttcagaggtttttttttctttttttagacggagtctcgctgtgtcacacaggctggagtgcagtggcgcgatcttggctcactgcaacctccgcttcctgggttcaagtgattcttctgccccagcctcccgagtagctgggactacaggcacgtgccactatgcccagctgattttttgtatttttagtagagacggggtttcaccgtgttagccaggatggtctcaatcttctgacctcgtgatttactgcctgccttggcctcccaaagtgctgcgattacaggtgtgacccactgcgcccggcyggtttcaaaggtttttaggagacagaattcttaggactcagatagtggattgaaagatgagagggaaacagaataaaacctagttttttttgttttttttttttaagatgaggtctcacgctgttgccctagctagagtgcagtggctcaatccaggctcacagcaacctcaacctcctaggctcaagtgactctcccacctcagccactctagtagctgggactacaggtgcatgccaccaagtccagcaaaaaacctagattttgtccctgagatagggtacaaggaggaagagcaagaaaagttaagaggggttgggaatatgattagttcaggattagatatattttaatattaagtagcccatgaaatatgtaaaaggaaataaacagtagacaattagatttgtaagtctgaagctcaggagagatatttgttctagagataaaagtttgggaatgatagaccaaaaaatgataattgtagttaagctagtagatgagattatccaagtatggtaagagcagaggactgaggagggaagccagagggctaccaatgtacttaattcatagtagaagaaagaggactccattgagaagagatgaggaggatagaaagcccaggagtgtgtggcttttagaggaaacaggacgagctggaaatggtcattggttgtggcaaaagaaacttcatagggagcacatagtaataagagtattgagaatagaagctagttagcagtgggttcagtaggaaatggtagatgaagtggtgagaacaaacatgaagatctcattctgaaatctgattgtgaatagggaagaataagcaaaagcttattcttttgcttacaaggacatgaaattctggcaaggattttctgtgtatgtgtgggaggtggggtatttgagcatgttgaaatatggtaggaagaagccctaaaggagggagggcaacatgaagtttcaggagaaggaatatatgggatcaagcacacaactagagattttagctttatttattcattgtttattttttaaaagtttacttattaggccaggcgtggtggcttatgcctataatcccagcactttgggaggctaaggctataatcccagcactttgggaggctaagatcacctgagctcaggagttcgagaccagcctggctaacatggggaaaccctgtctctactaaaaatacaaaaattagccaggcgtggtggcaggtgcctgtaatcccagctactcaggaggctgaggcaggtgaatcgcttgaacctgggaggtggaggctgaagtgagttgggattgcaccaatgcacttgcagcctgggtgacagagcgagactctgtctcaaaaaaaagaaaaaatatatttattgattgatagggtcttgcactgttgcccgggctggtgtgcagtggtgcattcatggctcactgcagcctcgatctcccaggcccaactgatcctctcacttcagcctcctgagtagctgggactacaggtgtgtgctaccatacccagctagtttttgtggtttttttttgtagggatcaagtcccactatgttgcccaggctggtctgaaactccaaggctcaagcagtccttccatctcggcctcccaaaatgctcagttaacaggtgtgagccatgtgagccactgtgcctaggcatttttttttttattggctgtgttgcccaggctggtcttgaactggactcaagtgatcctcttaacctcctgagtagctaggattacaggtgcataccactgttcctggctagagattttagccttagatagcataacattttgtcagggagaaagtatgattatcttgcagatattaaggtaactacaggtggaacaattaagtgatttcctatattaacacagcattctgttgtaggaatggagatgagggatagttgattgacccaggattggagttttactttgtgagtgaaaggatgacgaggtaaagatgccgaagactctggcaaaagtgattggagtaatggtccatggagtctagactgcctagggattgaagtggagatggggttgataacggagaatgtagaggaggcaagggactgaaggtccatgaaggctgtctgaacttgagatttcaagaatggagcaactggggagaagcaagtgcagggtatgacctttgtctgttgggacaaaggtcacctcagttgtagtggtcaaagcagtgggtatgtgggtggtactcaaggacagtgaggtctcctatgatgaaaacaagccaacactgcagtaaggaagactaacccgattcgaaaatatcagtgaatggtggaggctaggaaataacctgaatgaggaggggtagggtgacattatgccttatcttcaaagggatgagagcttttacatgaaagtggagtaatggtttggaaatggatttgaggaaaagaggactctgacatcaactgggatatggggaatttcagggaatgggcaacatcttgtgtgtgaaacctgcagagggtgggttttcagaaagagccagatttcagttaagccaaggaggcagggaaggactttcagtgctggattgtggaaggtggaagttttgatttggggggctagtgttacagacagacacaactggggggaaaatctcagtctgctttgcatttgagcaactgagttgtagtataaccaagatgaaacaggggctccattcatattaagttgcatgagtactactatgttcagtcagaatatgttgtgtgactacagtgtcccaggcaatatgttttgggttaataagcagtgcctagtctctactctggagctcagaatctagtgaaataagtggacaaataaacctatgtccatgggaatgactaactacaatgatttgtgaacactgagcaagggcacctggccctggaatgggagtgggggttcagggaaggctttttagacgtgatggctgagcgttaagtaggtaaaagaaacaggaaaccttgcatccaagcaaaggcacagaaaagctgatgaaacaacatggtcttaagtatggggaactatgagtagctcttgttgctgggatcgtgactgtgaggaaggcaatggtgagaacaaggcaagatgtgttatatcttggagggctttgtaggtcttgttttggatagctgttggagggtttcagggaagagtgaaaaagataagtatataggtaaatgccaacagggtggatgggtttaagagagtctacctgctaaaggtcagatgccctattagcaagggtcctaacaaaattaaataatagctttccacatgttttgaaagtaggatggggccaggcaaatttctcatcaaattctcagctttgggctgcactcggccactggtatctttactcttcttccttttagaagccagtaccttcatggctccctttttttggcttttggcctcctgtttggtactctgtgctctagtcatttaacagctatttgaactagaatcagttactctgatcttcagtttttgaatttataaatgaaataacatctgctttattctctccagctttagaattatgaattcacttttaggtttaaatatcttgagagtcttctctcacattgtttttgtttcctgtattttggggatagtgcttaacagtagtttttaaaaaccatattccttttttttttccttataagtrtacatgtcaggcagggcgcagtgactcacgcctgtaatcccaacacttgggaggctgagacaggtggatcactgaaggtcgggagtttgagaccagcctgggcaacatggtgaaaccccatctctactaaaaagacaaaaattagctgggcatggtggcaggcgcctgtaatctcagcaacttgggaggctgaggcaggagaattgcttgaactcagcaggtggaggttacagtgagccaagatcgcgccactgtactccagcctggacgacagagtgagacttcgcctcaaaaaaaaaaaagatacatgtccattgttgggaatctaaaaaagtagagaagcaaatggaagactataaaaaccacccacagtcacattactcagaaagaatgactgctaacattttattttgtagacttttgaattcgttgtgtgtgtgtgtatacatgcttttaaaaatacaaattctccctctaattttgtgaaaacattacatcatccagatcagaggaaataggcctggcaaaatattgatatttaagcattca

SEQ ID NO: 94277 - DNA, 55699 bp, Homo sapiens
aacaaagatcccagggaatgacagtgatgctggtccctgttccacacctccatgtagtaacaagtttataactgggtgcaaaatctcaggaggaaaaggcaagttatttgaggatagctggcatgaaaattgcatatgggtggagattagagactgctggatagggaaagaagagcagagatgagacctgtgatgctgatctctgcttaaaaggctaaatcaccaagggccttataagttaagcaaagaaagaaagagagagagagagagaaggaaagaaagaaaagaaagaaagaaaaaagaaagaaagaaagagagagagagagaatttagagcaccaaagacaaccaaagagcttccaaatggaaaaatggattgaaggagagccccactggaagaaagaaaaccaactaaaatatttttcctgttaagtagatgagaaatgatggtagtctgatctaacatagtggccttgggcatggggagaagtggaggaattcaagagatatgaaaagacagaatcatccatttggtgactggtttgcttgggggagatgaagggaagggaagacataagaaagacctggaatgaggttattgggttggtttcagctgctgactgtcaatacaaaacaactaagtacacggagaatggctgttcattaggagcatacacaggccatgtcttctccgtctcagttattcctgctaattttggacacggtcggcctgctttgttcaaaccacattcaaaaggcctcaatttctactaagtactcacggcctagtagggcaacacaaaaccaggaaagtaaatctgtacttcaaaactcaacagtaatttttgtattttctccccaagtgtggcacgtgttagcgttcccaaattagctattactccttgagggcaatggccatgtcaaacctattgtttccattccccacagtgctgatgaccaaataggcactaagagctggttgactatttgggagaataacgtctagatgattacatatcaatgccatttgttatctcacagactgattataataataacatctgtaagttgttgagtaactcttttacgtgcattataaatgccaccatcttctttgggttatcagactcctctcagatccttatgtccaggcagtttggataagaatgtgtttgactacagcttcattgaattattttaatagaatggaagcctatccattactgttaaactccactgccatctactgttcgtataataaagtaacatattgtgctctcaatctccgaaactcacctctatgctctattccttacaagtgaatttttgttttcctcagatctcaagggctttctatgctttgagcttcaacacaagtagatgtaatttttaaatagttttgttacaacaatccagcatgatattgacaattttctttcatgggcaaaaaagttcatggtgttatagaaaagtaaacatttttcacttaatgaaaccatgagcttttcatgtgcctccccccacataaagaaactaaaagaaaaaggtaatggaattactgaaaaatgcatccccacctctaggagatatcactaaattggacatctctgtcggccacattccattcagagtgtgaccctcatccttcaaggtcctgttttcaaatgataccttctccataaaacgttccctgattcttcactctgtaattaaattcttcattccacaattggtaattgttataacttatccacataaatgaagaaagtcaaaaactccagtttaaaaaaataactttgtaaatcatcccccctcatcttccctactctgttggttcttgtttttagactggactctcaggtgyaacaatattattgttactggtggagagtactgactacaaatcacccaggttcttggcattttgaacaaagaattggacaaaattcacaaacaaagcaacaaaaaagtgaagcgacaaaagcatagatttactgaaacaaaagtacactccacagagcgggagcgggctcaagcaagtggctcaagagcgctggttacagaattttctggggcttaatttttttatttttttgaggcggagtcttgttctgtcacccaggctggagtgcggtggcacaatcttggctcactgcaacctacacctcccaggttcaagcaattctcctgcttcagcctccccaatagctgggattacaggcccacaccacacctggctaatttttgtaattttagtagagatagggtttcaccatgtcggttggccaggctagtctggaactcctaaccttgtgatccaccctcctcagcctcccaaagtggtgggattacaggtgtgagccatcgtgcagcatggggtttaaatagcctctagaggtttcccattggttacttggttacaccctatgtaaatgaaggagtggcccgtcacaagtctgactgatcatgggaggtgaccaatcagagtctgaagtgacggtagttacaaagttacacatgaagacttggcctgcaaccagtctgaatggttgtgggaggggaccaatcagaggtactttccatttttcatttgcagtgcagtgcaaagggagtagcctctgatcctttcgttacattcgtgtgaagaggtggggtttcccctctgattcagttctaggaagtcagtgagaattggccttaggttccctgcctctagaccctattctcctgtctcattttcccgctgtgagacatgatccccataaatctttatgggaggcagagggaccaatggtctttcttctgtaactgcttcatgctgacttggggtgcggtgcctacctatttgggatcacagaactctcactctgctctgtctagtggatacagggtagcttcttgatggccagtagtggtgtcttcacctgaactggctggaaaccttgttgcatgatcatctgaagcttgatggtctctaggcgagaggaaattaatttggttaatgtatttaataaatatggtccaaaaaccaaggcaagtataattaacaacgagccagtcagaggaaggactcatgaacccstaattagcatttttgaacaggaggaccacgacttggacagctgttgtcgtatcttagaagcctggtcagctaatttctgggtggcatcccttactaattctaattggttgacataaaaacagcattcttcctctagaaaaagacataagccaccttttccagcagttaggagatccagtccccttctattttgtaaagcaactgctgccaaggagtctgtttgagtttgtgttgtgacgatactttgggcaatgtcatccaagctttccacaaaatccttggaaagtgctggtaacagtatagggaagttgcaagcccggtaactcccgttcctgctctcactgttattcctagcccaacaaaaaggcgtttgagttggattgctcatttgtgtctggcggttgcagttaaaggtataatgagggattggttgttgagagctctccctctctctctctaaatatatatatatatatacacatatatatatagtttgtttgttttgagacagtctccctctgtcacccaggctggagcacagtggctcagtcttggctcactgcaacctctgtctccagggttcaagtgattctcctgtctcagtctccagagtagctgggattacaggtgtgcgccaccatacccggctaattttttgtatttttagtagaaacagggtttcagcatgttggccaggctggtctcgaactcctgacctcaggtgatccgcctgcctcggcctcccaaagtgctgggattataggcgtgagaaactgcgcccggccgggagctatattgatttcggaggctaaaaaccaagtgtacaggttccagtccaattggctggtaaacacagtaggaactggtgctgcacagggaaaaggttccttgtttttcaagacaaaaattgttttccatggtgaacatgtgggttagcttgttgttttcactttcccaagtggttaagtttcctactaaagtggccaagcgaaaatgtcaacccagctagtgggcccaccttcacagtacttagactgtgcatcctttaaagtgcccttaactagggatggtttccatgaaaagcatacaggttttctaaacgatgcagtttggttaattgcatagcttacatgattgtgtgagggttaatttctggggtgtggttgcattgaagacttcaagttcccacgacctgaacagaattttggcttctttcaatacaaagtggcatctggaattttagctctgtgtatgttgatgttgggcccctaatgggtttctgtgggaatgcaccctcaaaaaggttgctctgattggactggagagggtttactgctcatcctgtcattttaacctttgtcatttccatacttttgaagtcttataagtcatccagattcattaattcaaagggagttcctccctggtagttggaatgataggtcatttttttcaaggacccaagatcgggctgggatagggatggcagtgtatctggatgaagataggagataaacaaagccaacagtcctttgccagagctgagctggtggtatttaacagtctttgcattaaatttaaagttcttaataaatacccagaatctattaattgccagaggggtaaagtgaagctctgttgtaaaataaagctgattccctgtatgcggtgtccctgtgtatactgggtgtatactgggtgtccattatggaacaaaaaaaaaatacttatttgctattttgttctatagaatgggaacttcagggggtggatacctgtgctgtcaggaatgctagttataaaaatgaattaaaacacttcatatattacaaaggaagtgattccatctatttggacgaaagcaattaaactgcaaaaatataaaaaatggcaactattattcagtctacagtaactatgcaacaaagacaccaaggaaagttggtaggcatttacgtatctcacttaaaacaagtctataaagtggtttattttaagaagggtacattttaagaaggacaaaatcaaaagcatggacaagtgttggatgagctgatgaggttgtggcaatttactttgtgaatactgtgagagtttgtccaactcgctgtgcttaggtactagatggtgaggatttaaaaggtcaatgaagtcacagcagaccagcactcaaacatatttctcttctatttcctacttttgaataaaaatgtcagaagtgggcggtgggaaaggaacaagcaaaggagtaattatttgaataaatttttggcgaaacgtgggtgtctgacggggaggctgtgcggtggtgaccaacgcacccatgcgctgggtttcacagatgcagactgaagtccaggctctgctgcagattaacggggtggccgccagcaagtcaagtgacttgctcttctgtgcactgcatgtacttgggttcctctcacaggtattcctgtttttcctctttcttgctccaggttacacctcgtggcgcggcgctctcggagagcctgtggagtggccctgtgtccctccctgacccctggaggattccgtaaggtcacagtcaccgcctccatcccctacttgccatgtcttcagggctaatgcataacaattatcacaatttacagcagccccacgctctgaagagcttctggaggggatactactcaagcggaggaaggcaagacagggacctcctccctcttcccggacctcttctgataaggaatatttgtaggtggttaagaaaggcagcgggagggcgtgaaggcaaagacaagctttttttctcgtaggaacacacatcttctggtctggctgtgtttccggaggcatttccagaggacctagcgaggaccaacttccggctgcgacttccgcgtcttccgagtttcgagacctgctgcttccgcccggagttgttgtgggctccagcagcgagtagccacttccgctaggagtccctagcggccagggcgtggaagcggattctgaggcggctttctcctactgccctccgcttgccaacgcgggacccggagcccaacggcagcggcggtccttgggcctgtggagaggggttctctgtggccgagtcctaggcctggtgaaccgcgcggtgcgggagaggcgcttgggcctcgtccagccccagcccctgtctccccgcggccggtgccggcggctgtaggcctcgccgcgcccacccagcctggggcgggcccagcctcaccgcccggcccgccccgccccacgggccagccccgcgccgggtgtttccgctacttccctgcggcggggtaaccgcctcgcacctaccgggctcggttccctggctccggccgcgggggagcatggagtttgcggagctgattaagaccccgcgggtggacaatgtggtgctgcaccggcctttctacccggctgtcgagggcaccctgtgcctgacgggccaccacttgatcctgtcctcccggcaggacaatacggaggagctgtggctcctccattcaaacatcgacgccatcgacaagcggtgagtgcccgccccaccccagctccgcagggagccgggggtcccytgtgggcgccccgggaaatacttcctggcgttttccgcgcagcctgccgcccagctagccggcaagatgagccctctgtggcctagaatcaggatttaccaagctgaaacccgtccagatggaggacccggtttccattaaacctggatggagttctcagggttatcgtgtggctggtaccatcctgatgatcatttctggttcgtaacaccatttgggtggattttcggcattgtctttataaatttcttcttcttcttgccccatcgtattccttgaattggtattgtcartcaccgttcatgaagtgattggatgtgatttaggtaaagtctttaccatttstgaggaaaactaaacagattataaagttatgagtgtctacatgctacagaaccatttttttaatttctgaaaaatgttcagtgtatcatattatttcttaccttctgggtcatcaaaatttaattctcactaagggagattctgatgtcttctcttcatctttactcaattctgcttgctgaaagaacagggttggctctcaaggaaaggcatggaccagttaacctcttttttctttttgtactccagactttatctttccaaggcagtgcctcgaagtcaaaaagttaaactttcatctkcattcaaaattcccatctccttagtggctactcgctagccaggagagggcaaactgattatccgttttacacagaagtataaatgaatgacgacaacattttctattgcctcacaggataatttggatattaggaagattcgtacagaggatatgccttaaaataataatctctttctttctttcttttttttttttttttttttttkgagacgaaatctcactgtattgcccaggctggagtgcggtggccaatctcggctcactgtaacctccacctcccaggttctagcgattcttctgtctcagcctcccgagtagctgggattacaggcacgcgccaccacacccggctaatttttgtattttttagtagagatggggtttcaccatattgaccaggctggtcttgaactcctgacctcgcaatcctcccgcctaggcctcccacagttctgggattacaggcgtgagccactgcgcctggcctaaaataaaaatttctaatggtagaattgcaggcagtttgggtgaagccatggtagattgattgattgatatgagcagggggctcttattagtctcctcaagccaccttttgctgtataaagtcttcagtgggcccggcacggtggctcacgcctgtaatcccagcactttgggaggccaaggtgagcggatcacctgaggttaggagtttgagaccagcctgaccaacatgatgaaagcccgtctctactaaaaatacaaaaaattaaccgggcatagtggcaggtgcctgtaatcccagttactcaggaggctgaggcggaaaaatcgcttgaaccttggaagcagaggttgcagtgagccgagatcgggccactgcactccttcctttgcaacaagagcaaaactccatctcaaaaaaaaaaaaaaaaaaaaaaaaagtcttcagtggtctctcattgaaaatctaaacccctcagtcattcatggcattctgtgtctcggccctatcctactttctcactttatttcttgccatttcttttaacgagccyttcttgcacttgctttcatgaacgctttttaccagccagtcctcactatttactggtgctggtatatgtcctgtattctgtcatctgtgtattttattgacttcttccttctgctggaatgccttgcctctcccaagtttgtttaacatttgccaaatgcctttatgttmtggacgttttgttaggcatttaagacaccaagrtaaataaaatatgttacagttcttgtctttcaggagttcacaggcaatgagcctgttacctgtctatgagtattcagtttaaccatttcgaccgctacctccttcacaaattcttctgttaattccacaactggaattcatttttatctccttcgaaacgtctaactgtggcttgggcatatagacgcgtaggaaacaaaagaaggattgaccgctgaatggtcagatgccgttgaatacaactgagtagtttctccatgaccatcaactacctttcctttcttatttaccttttatggtggttactttgcgctcatttgtttcctcctttttaccttgcatttacaaggtgctgggctttgtagtacatgaagaagaagcagatgagccatggacctttgaatctgttaggagagaatgacgaactgtacacacatttatccttttcctgggaagcagcgtggtgtagtgaaagagcataggggaggcatcagatcagagtttgttaaattgctgctttcaagaaatctttacatccacctgttttccacgtgcattgtctgagctgtgcggctgcagtggtgactaagacaagatgcttaggtactggccagggagatggacaatcaagcaagtccagaaataaatatatatatttattagatatatttatatttattatgtttattatatattatatatattataatatatattatatattatatattattttcttatatatttattatttatttattatatatttattatatattatatataataywwattatataatacatataatatataatatataacattatatattttattatatatgttatatattatattataatatataacatatataatacgtattatatataacataatatgtattatatattatataatatgtgttatatatcatacgtattatatactatgtattatatatgtattatataatatatattacatataatacatagtatataatacgtatgatatataatatatattatataatacgtattatataatatatattatatttcacctatataatatatataattattcacctaattatattaaataattattcacctaaatattcacctaattattcagckaataggtgaataattatttattcacctattcacctaatacatgtaattattatatataatatattaataattataatatataataataataattatattataataattatatattataatatagtataatatagcatataatatatattataatatgtatatataatatatatacataaatatataatatatttayatatatataatatatatataatgatgtcaggtaataagggccaggaaggaaartaacggaagatgagaggataaagagcactgggaggcagtttccttagaaagsatttcagagaaggcaggtgacatctgactacagaccggaatgaaatgaggaagctagaactgtgagtrtctgggggaagagcattgcagccagagggaacagcgaatacaaagacttgagatggggaacatgcttggcatgtgcagagaagagcgaagaggccagtgtggctgcagggcagggaacagagagtacaggaagttgatggtagagactggctggagggataagcagtggtcagaccgtggagggcctgcaggccacwgtaatggttttcatgggagcccttggagaggtgaaagctaggaagcagcagctgatagatgtttcagaagacaattctggctgctggcagaaaataaactgtaggggggcaagactggaagcagcaggcccagcttggagagtagagtagttcacataaaagatgatggtaggccgggcacggtggctcacgcctgtaatcccagcactctgggaggccgaggcgggcagatcacctgaggtcaggagttcgacacagcctggccagtatggtgaaacctcatctctactgaaaatacaaaaaatagctgggtttggtggtgcatgtctctgatcccagctactcaggaggctgaggcaggagaatcacttcaccctgggaggccgaggttgcagtaaactgagattgcaccactgaactccaccctggggtgacagagtgagwctctgtctcaaaacaaacaaacaaacaaacaaaaaacagtagtgtagtcacaaggaatctgatttgggatgtgtttttgaaagtggagctgccttgccttgctggtgaattgtaaatgaggtgagaaagtcattaagggtaactccttcagttctgcctcttactagacaagtgcctttgggcaaactacttaacctcgtagaaacttaagtttaaataatgcttcacaagtctgtggaatactttcatatatatcgcttacatcattttatttgatcctttcaacatgcaaggttgtatacaagttttacagttayacctggttttttttttaatggacctcagaaaattgagttactactactcagttgatgactcatcattttcatgattgattccttaaaaggtttcctctgttgttgattttcttcctccctaattttcactcccrtttcctgcctcatccacaatccctgtaggcaaccacgttagttgttgctataaaatagatagcactattgtgtatgggtgtgcgcacacatgcatgtgtgagtttaatttgcctaactgggattatgttgtagatcttgttctgcttcttaatatggtgacacaatactgtttcaagatctcttcatattgctgtgtgtacaaccatttcactgcttctgacagcataggattccaaagtatctaaaagagcttccttaacagaccttttaggtaacttccaactccctgctatcacaaacaactctggtaaacatactcattcatgtccctttatatagtcttgtgccataattgctctgagactgcccctaggatgggatggcgccataaagtaggtgcgtatctcatttcacaaactaattgctttccaggatgacaattgcacattgccttcccatgatggtgcaggagagggtacctcgtctccactttcttaccaacatttggtattgtctttctaatttttccagtctgaagattgtgaaatagttattgctttgttttaatttgaatttcattaattattagtgtttaattatctttgtatatgcttgtgagcagtatacttaaaatttttttttttcctttttgtgaattgcctaatttctgtggtctacttttaaacattgggtttattgtccttctcatgttgatttgcatgggtaccttgtatactctgtgggtgttcattctccatttaggcattacgaatgttttctagtgtgtcacccatctgttgtttttttctgtggtgccctttgttgaacagaaatctttacttttaatgcagaacttgccaatgttttgctttatggtgtgtggcttgtcttaagaactccttccctgtccccaaatcaccaggatgttctcctacattttcttccataatagcttcatagttttactgttcatttttaggtctttaatttggattctatctttgtttcaagtgtgataagaacctatttttctccatrgagcaagccagttttcttaatcccatcacgtgacaacccaaccttggctggtttatgtcaagttatcctatatatacgggtctgtttctgagctctctgtcataatccattggttcattaatctgctcttttgtcatcatcatattctctttccttctgtggctttgtgatgtgtccaaaaatcggatagtgctagttgccccgctttcgttttttttttttttttttaaagttgacaactatgtttcgacctttatgtttccatgcaattttggaaaacttgctatgttcatgggatttttaaaagtctttaataataattgaagactcaaaggcagttgcaaaaattgcacatagaggttttagaatcgtccactcagcttcccctaatgttgacctgttttataactgtagtgtaatcaaaatgaggacaaaattaggacattgacaytggtgcagtactattaactagaccacagactttatacaattttcataggattttaaaaaaatgaattgttttggatttatagattaattggagtcaaattgacatcttgacatccatgaacaatgttacattatttattcagatcttcctttaagtcccttagtggaactttaagatggtgtatatgctaggtgctgtactaggagctgaggatatagaaattaatcaaacatgccttctacctgaaaaaactaagaccattataagaaataaacatataaactagaaagtttaataaagtattttaaatgctgtgatagggatgtatacagggcatggatgggacaataaggacaaaatgataaaatagaactgaatctgacaattgatgtgaatcataggagttttgtggagctcttatgtttttaaaacatatttttcttggcccactgttctataagtaactgactagaaacattgaataaatgaatggagaataccttaatagtttatagcatatttattctgacataaagtaacaattatttttaactcctctagtcattcattatactttatagcaactacataaaacctgccagactaacaaaacaaaattcaccttacaaaatgagttagtatgacaagcatagatgatatggaaatttacaagagaataaccgtatgtcttgtacattttttttgtttttttactgacagtttggttgctgtgtgtctttcacttccagctgaagcagaatgacagtgatttttaaaacagttttattgaggtacagtcgacgtattacacactatatatatttgaagtgtaaactttgatgtgtgttgatatatgtacacaccctgaaactgtcaccataagttcaagataatgaatttatcacccccataagttttgtggtgccctttcgtaatcccttccttcttttcttttccaagtagtcacagatgagtttgcattatctagaaatttatgtcagtatatcataaatcatgcagtactctcttttgagatttgtccatgttgtatatatcaatagttcattctttttattgctgagtactaagtgtccattttgcagtattccatagttcatttattcacctggtgatggaaatgtgggtttccaatttgaggctattaaataaagttgtttttaatattcttatgcaagtctttgaatgaacatgtggtttcttttctcttgggtggcaagccatttacttgccagtggaatggctggatcagatgtaggtatgtgttttactttttaagaagctgccccaactgttttccaaagtgcttgtacctacagttctacatacctatgagcagtgtgtgagagttctatttcctccacattcttgtcagcatttgctatggtctgtcttttaaattttggcaattccaatagatgttaagtggtatcttactgtggcttaaatttgcatttcccttatgactagtggtgtagggcatcttttcatatgcttatttgccatccatatgtcttttttttgctaagtgaccatccatatagttttcccatttgtaatggattatttgctttcttactgmgttttgagagtgtatgtttgtatattcatacacagtcatgtgatttattatatatatgatggtagtcccataagattataatggacctgaaaagtttctcttgcccagtgacgttgtgtttgtggtgatgccagtataaacaacaaacctgggctgccagttacacaacamtgtagcacataccattgcatacatcacataatatttataaacgatcataaaacgactttgttactggtttatgtatttactatagtatacttgttattgttattttagagtatactgcttatacttctaaaaagaatgttaactgtaaaacagcctcaggcaagtccttcaagaattatccagaagaaggcattatcatcacaggaaatgacaggttcatgtatgttattaatatttcccctgaagaccttccagtggggcaagatgtggagatggaagacagtgacattgatgatcccaaccctgtgtaggcctaggctaatgtgtgtgtttgtgtcttaggttttaacaagaaagtttaccaacaaaaattttttaattggaaaaagcttatagaatgaggatataaagaaggaaaatatttttgtacagctgtatggtgtgttgtattttcagcttagtgttattacaaaagaggtaaaacgttagagattaaaaagtttataaagtaaaaaagttacagtaaggtaaggttaatttattgttgaagaaagaaacattttaacagtaaatttagtgtagcctgttgatgaagtcctcaatagcctacaggaatgccccgtggcttaccttttcatgctctttaaccctgtgtttcaaagagcagacgttttacattttgaacatgtccaatttgtcagtttgttcttttatagattgggattttagtgtcttatctaagaaaccattgcctcacctaaggtcacaaatattttctctcatgttttcttctagcagttttatagctttgggttttacatttaggtaaaaggtcccattttgagttagtttttgtatatggttcatgattatagattcaaattctttaaaaaaaaaaaaagctatccagttgtgccagcaccatttgttgaaaagactgacctgtcttcaattgaattgtcttcgtatctctgttcacgtgtaagtggatctatttctggactctttttttctgttcagttgatctgttatcatcatgtcattttcacactgtcttaattactgtagctttatagtaagccttgaaattgtgtagtgttagccataccactttgttcttattcaaagttgttttggctatttgaagacatttgcatttccatatgaattttagaatcaccttttcagtttctacattaaagtctgctgtgattttgtttggaattatgttgtatcactggatgaatttggggaataattgacaataaaaagaaaattctgggtacatttacacaatcgtcatctgcaaataaaggtagttttacttcttttttaatccttttttattctttttaccttactgcactagttataaccttgagtgcaatgttgactagaagtggtgacagtgaacatctttgtgttattcatgattttagagagaaataattcaatccttcaccgttaagtgtgctattagatttagggktttttttgtggggttttttgtaaatgcccttatcaggttgaggaagttcccttctgtttcaaatttgctgagaaatttttggtttttcatgtttttaaatcagaaatggatgttagattttgtcaaatactttcacttttttttttttttttttgagacagagtctcaactctgtcacctaggctggagtgcagtggctcagactcggctcactgcaacctctgcctcccgggttcaagcgattctcttgcctgagcctcctgagtagctgcatgccaccacgcccagctaattttttgtatttttagcagagacagaatttcactgtgttagccaggatggtcttgatctcctgacctcgtgatccacccgccttggcttcctgaagtgctgggattacagacgtgagccacggcacccggcccttttgctttttataaattgatacataatatgtatcacttggaagtaagggaaatctgaagtgaactgttttcctatgctccagaaatatctctctacaaacacttaacacattagttacagatctttttcctattctttgaaataaggccccaaataatctccatcagaacagttagcttaatgtgaattactttatatatttgaaatttaaaaaagacatatattgtaagtaatgtatggctcacattttaatgatgcagccttgcttcttccttaattagactgaggagaagaaagttaatatagatggtaactacaactatattctcttttcaaagaaataataatatatttaaagttagtaatatatgtgttcctaaacatgatttgcaatttcttacagatttgtaggatcactgggtaccatcatcataaaatgtaaagattttcgaattattcagttggatattcctggaatggaggaatgcttgaatatagccagttccattgaggtaagtattttggaagcaaaatctaatgaaacataattttatattaygactcagtgtagctcttccatttcttcattagataatttagtcatgttctctgactcaaatactgaagactgataggaaaagcctcaccctggttcatygtcatatgagtgtaatggaactttcttgacttccagcagtgtctggtgttactcacgttatatgagtagctcaattccatgagttgcytggaattccatttccaatggctttgtggaatttccatgagttcatattggttaaataacagatactgtttcacttgagtgtatgagttcttatttggggaaaccattagaagatttagtaaagaggttcttgggagaaattttaaagttttgcttgatattttatgttcactatacaaagctctgtgccaaagactgtaaacttctttttctttcctttacttgaggtttgttcaagtaaaatcttatatggaattgtaaaccaataaaatagatacagttagaattgcttttagtcacattacagtgagtaggtagggactggggggacctagaagccctcattgacttgactattcccatctgccctctacagagttccttagagacactgcaaaccactagtgagttaaccagtgcactgttcacttctctaccaggttagcagctagaagtggaattgtttcttcttgaatatactagtatatcttttgtaataaatacagttctaaaaatttgaatagaaatattaataaattagaatattattgtaccatattattacwtatatatatacacattattacatgtattagtacattattgaacgatagcacagtttgattcttgattttaccacatgctagcttgtgaccattggtaaagtacttaacatctctctgatttgttttctacgttttataaaacaaggataatagtacctatcttttagggctgttgtaagaattttattagttgatgtgtgtagaatggttagtataatacttggtaaatagcagctaccatttgagggtcctctgtcattacttactataattttatggtgatgcttttttaaaaaaattgtggttagaaaacasttaaccgtttttaagtgtacagtttagtagggtataaaactttattcacattgttgtgcagcagatctccaggactttttcatcttgcaagatcgaaactctgtgttaaacaacaccccattttcccctctctycagctcctgagaayccccattctactttctgtttctctgaatttgactactttaggtatctcatataagtagaatcatagtacatagtatttgtctttttgtgactggtttttttcacttagcataatatcctcacagttcatctgtgttgtaaattctgactttttaaggctgagtaatattccattgttatggatgcatgtggtgagacttttaaaaagttatttcttttctaaagcaagtaactgtcaccagtgattatagttttttgtttgtttttagtaatctgaattttcacgtatcaattagcttaagacagggtgtgtttgctttttatttatataaataatattgaatattggttcagattacaaataatagaaattttacttggttagtttaaatggaagagctcatactgttttctttccattctaaccaactattttgatgtacactgaaattttaaattgccttattttaaactattgccactaaattatatcagttaatcttaggtttatagtactttctagactactataggaacgttgattttttctttccgtgtatgtgtaactaatctggactttgtgtccaaaaaatgctatcagcttagctattaaaaatgggtagaaagtcttaaaaatctagaagtaggattttagtgatttttaaaacrggaatagagaaatagaggaaaaactgttatagtgctaagtaaatggtacataacacatttcttcctgcctttgttgaattttacttaaggaaatgagaagatgaactgaactgtttgtcttacacatctgtcatttggaagtaatgcatgatgttgatttgatgtaatttgttaaattgaatgagaatgcatgtagtttatagactgttaaattgaaataatgtcccactatttgggcatttgggcagaggaacattacccacttccattgagcatgtatgtgtttgtgggttttgtggtttttttttttttcagttaggagattggattttcactgaccagtcttcgtttttcttattcctttgtgagaattgatctgtaagatgactggctgsttggtgtcagagatgctgcctgtggtgaggcacagtggtgaaggaaaaggggaagtgtgctacccacttgctgacgctgatcagttgtttaagtagctgtatatattttaaaactctttagaaactgactcattatataaaagcccttaggactgaaaagaagccgtaaattatgagctcatttgacctcagaaaatgaatgctctgttaaatgttcttacagcgtagtgattaacatagtgaacctgtcctctatccttttcctggcacagaatccctcctgctagccctccacccttccccgaatacatctggacacgatttgtgagtagtaattgaatttttcatatagcatagctgagctgtcctttgtaattaggagtccgtatactcaaatatattctgctgcctcacgtagaatcccattggaagaatagctggcaagtgctcagttatctaaattgtagcaataagttrgtgaagctttttttcagtgtttcacctgcctttggaagtgaaatgttttcagttctctcagcattaatgtgtttaaaggaaaagacctctttctagtgacataagatctcaagatgaaatatgagtgcttattgcctgtgagagtggttgctgacttgcatttaaaataatggtggttctgattgacggcagccctgagttaggtcagayatggacgctggctgttctgcttctgtttggtgtgattggcagccaaagacagtatagatgtaggaaaaatatatatatatatatttatatggataatggattatacagccatgcttctctatattttgttttatgaggtaggagagaaggtttcatgatttatagatggatagaaaaataactttggatggagatgtttttgctacactgctgagctrtatgtccggtctactattgaatagtcatgggcctatccttttgcatgcctgatcttcctctgacctggagggagataastgcattctgagcattgctgttgggccttctcctcctgtccagrtgaatgtctccatcattcctgcagtttgaattatgctaattgatatggtatcctttccccgctgcacccccccccccgccatccagtatagaaatacttttttccataatccccctgtgagaaggatgaatctgcctagtgatagagactttccttctctctgttcctcccatctactcaggttttcctatgtctgttttccaggattcaagtgctccaggtaaatataggcccatttggggctgatagagttattgcccccatttgagaatggatccctgcagcatgaaaatatgatgatacatgaccaaatggcatataccagtctaggaagagaggaaatgaacattgatggaatttctacctatgtagagcatgtcatagctgaaattggccaggtgcggtggctcacacatgtaatcccaatactttgagaggctgaggcaggcagatcacctgaggtcaggagttcaagtctggcctggccaacatggtgaaaccccatctctactaaaaatacaaaaaaattagctgggtgtggtggcaggcacctgtaatcccagctactcaggaggctgaggaaggagaatcacttgaacccgggaggcggaggctgcagtgagccgagatcgcgccattctagcctgggtgacaagagcaaaactctgtctcagaataaaagtgggaattactttagattttattatgtgccagacactgttctaagccttttacacacattatctctcttaatgcttcaacaacactatgaagtaggtatgttatttcccccattttacagttgaggaaactgaggcatagagtggttacatgactttcctactgcactgctaggatttggaatttcagtccggcattctcattcccatctgactgtagacctctaggctgtatcatccttttttacagttactaacccaccctgatttcaaataatttacataagtttatttaggtaataactggattttgagccaagaccttactgactagccaaaaactgatccccagaaatacttagacctttttattaagctttattaattgatgtcgaggtgttatttcatttttcttctagaattggtatgcacatttttttgttctttttttcatcccgtcaacacttttgagtgtgtgttatgtggcagatgccttgttagatactagaagcaaagaaatcagcttcmgtaagactaaaattgtatctggtgataaacacaatgttagagaaacattctgggtgcccatcattattagaccatgtttgcttaatackaatttgtcagttagaatatgtttccagttgtggatgtttcttttttgtctttcttttytttttgcccccaggcattgtctactctggactccatcactctgatgtaccctttcttttaccgtcctatgtttgaagtgatagaagatggctggcattcyttccttcctgagcaagaatttgaactctattcttcagctgtgagttaacttttgagaactgtggattatgagaagtaacccaataccttatttgacttgtgaaaatgatcacttcttttgaagagtaataaggtgaagttgacttatccattcctaatcttaatatatttaaaaggattgaagccatgcagagtatgatctctgatcacaaaggaattagattaataatcagtaatactaagatatctaggaatacccccaagtatttctaaattaaacagaacgcttgtaaataatctgcatgtcaaagaaattagaaaacattttgaagtgagtgataatggwtatgtaacatattgaaatttgtggaatacagacagctaaggcagtgtttagagataaacttacagctttaaaatttttactagaaaggaaagtctaaaattattgacctaagcaccaatttaagaagctagaaaaaaaaagcaaagtaactagaaagaaaaaataataaaaataagagcagaaagcaataaaataactagaataagtaagtttagcaaagttggttgatataagatcggtatacaaaaacgaattgaattggcaacaagcgatctgacaatgaataaaatatttacgaataaatttaacaaaagaaattcaaggtctatacactgaaagacataaaacattgttggaagaagttgcaagagatctaaataaaaggagagatactgtgtacatcaattggaagacaatattgttmaggttagtggttggctgacttttgtgaaagaccattagatagtagatattttaagctttgcaggtcatgtggtctctgttgtaactactgaactctgctgttgttgcatgaaaaaagcaatcagatgagacatcagtgaatgggtggtgctatgttctaataaactttatttgcagaaacaagtagcaggctggatttggctcattaaagtggcagttctcccttaattgatctgtagagtcagtgcaatccctgttaaaattctaataggtgtttttgtagaaatggacaaaatgatacaaattttatggaaatgcaaatttaaatatataagtttatatggaaagtcaaaacagctttgagaaaacacttgattactgtaaagccacagtaatcaagagagtatggtattgctgtaagcgaagacatacagaccaatgaaacagaatacagggtacagaaataaaccttccccttaatgctcagttgatttttgacaaaagtaccaatacaattcaattgggaaaggatagctttttcaaccaatagtattggaacagttggatatccatatgtaaaaaagataaacctagacccttacctcacatcatccacaaaaattaactaaaatgtattatgcaactaaacatgagaactaaaactatcaaacctctttaagaaagcacaggagaaaatctttatgaccttcagttagacagagattttttagatatgacaccaaaagtgactgaaagcaggttagtgatttcctagtattgggtgttacacaggtgtatacaactgtcaagactcatgaaattgtgtagtcaaaatggattcagtttattttttataagttttgtctcaataaagttgactaaaaagaagataaaagaataatctaatgcaaatgttaagtagctgattagaaacagcttaggagaaaataagtgatttgaaatatagatccgaaataattactcagaatatggaacagagaaggaagatggaaaaacagagaggttagacacatgcatgcttaataaaggaagaagatccaatatttattacatgggagtttaggataaaagatgatagaggctggttatggtggctcacacctataatcctagcacttaaggaggctgaggcaggcaggtcacttgagctcaggagagtttgagaccagcctaggcaacatggtgaaaccccatctctatgaaaaaatttagctaggtgtgataatgtgtgtctttggtcccagttacctgggggtctgaggtgggagaatggcttgagcccagaaagttgagtttgcagtgagcagtgataatgccgctgcactccagcctgggtgagagagcaagaccytgtctccaaaaaaaaaaaaaaaaaaaaagaggaagacaaaaaaaaaaaaaaggtgatgatagaagaaagacaatattcaaatgcataatggttgataattctccagaatcagtagaagttattgaacccttaagctgaggtatcccagcaaataccatacaagataataaaaaaatctttagacatgttgttgttcagctactgaacaataaagcaaagaaaataccacaaagttaaaagacaaatgacctgcatggtgttagattaacagaggaaaaaagtttgatcaatatctatttatgataaaagctcttagagttggatttgaaggaaatttatttaatctgataaaggatgggtaccaaaaccaaaaacataaaaaaagcaaatcttgtatcattctctctaagttcaagaatgaggcaaggatgtccattgtgactacttctagtcagctcaataagacaagaaggaaaaatacagggtatagggattgaaatgaaggtagcaaaattgtcaatatttattgattatatgcttgtctacataggaaaaggaaagaatcttgagatcataggcatttctgtacaccaaacacaattttgaagagatgcagttaaaatgcaacaaagattattgggtttctaggaatatatctaagaaaagatagtaagacctttattgagagaattataaaaatttatggaaaaaattttgaaagcttaaacaaatggaaaagwcaatatactcatggatagagagactgaatattctaaagatgtaagtcattccctccgatttataaagtcaatacaatcttaataaaaaccccagttggtttttatattgaatttgataaaagttgcatggaagaccaaaagaccaagaggagccacgttactctttgaagaacaaaaaggtgagaggaggacacttggcctactagataccaaacttattttaaaagctataggagttactaaagtggacaagtgcgacgggatggagagcacagtacatttggaccaacagaagcggcattgcagatcaatggagagccctgtcattctccagagtaggaaatcaataataatatatcatagtgaaagttcaagaaataacagtattatcatgttgtttagaaatgtaaaggtaaacactgaaaaagctaaaaatgttgaaaatgattgcctttggggaaagcaaattgggatgggctagcaaggaacagataactacatttttttaaaaataataaatctttagaaactgtgttttttttaaattaattaattaattattttttgaaacaatctcactccagttgcccaggctggagtgcagtggcgctgtcacagctcactgtggcctcgacttcctgggctcccgtgattctttcacctcagcatcctaagtagctggaaatacaagtgtgtgccactgtgcctggctaatttttgcatttttagtggatatggggtttggccatgttgccctggctggtcttgaactcctgaactsaagcaatttgcctgccttggcctcccaaagtgcmgggatgataggtgtgaaccactgtgcccagcctagaaactatgtttttaaactggtaacataaataactttgaaaagtgaaaaaatttaattaaaaatgtgatactgtatcttataaaagcattttttaaaagtaataatcttgtctgttagtacgtctaacatactttttagctttatcttcctgctattgtaacccatggttaggccaactcagatatacagaacatattgaaatttacatataatttgattttttttttttactgtaaaaccttttgacagtgttcaagctgttttbaattctgatgtttaaaataagttgtcatttgatagttttatattgtatacttctagtccttactcagtttgaaattatttcattgactcctaagcttaaccttccttagtattgagttggtactgttttaagaaaggtgttaccaatcttagtrcattttttaccttttttaaaataaacaaaggrtttgatatagatagtagctgtgttctcatttgttctggggatgcattatctggagtcgtacagtcttacttgtgctttaagaggatcattaacaaactaaatgggacccagaaaaggaagaagtaggatgatgttggccgtgataattgtggatgtgcttaatatatttaacttggagaatagaacactaaggaggatcagctgtctttcaaacatttgatgggataccgtgtaaaatagggaacttgtacggtgttgtctgaaagtacagtaaaaaccaatagagggagctacagagcaacaagttttgctcagtgtgagaaagcactttctgggaactggtgatacctagcaatgcaggaagctggccctgaaccatagagctccttttctctgcagctacttacatataagctagagatccacctgtgaaattcctgagaaatggcttcttcatcagtgaaagttgacctctaaggtcttttaaaatttctcagattattttgcgacattgagatagttgcttagctttgaagtattttgtgtttttcagaccagtgaatggaggctaagctatgtcaataaggaatttgctgtctgtccctcttacccaccaattgtcacagtgcccaaatccatcgatgatgaagctcttcggaaggtagctacatttcgacatggagggcgcttcccagtactmagctattaccacaaaaaaaatgggatggtaagtgcacagcactactgcttgatgtactgaaaggcttgggttggggatcttttcgtagaaatgttcccttttgctmtctgtcygttcactgaaatgattgtccaggtctccaccacaagggcttccttcatgtaagctttagggaatcaggagtagggtgttttctgtggtgaggatgtgatgctgaattctttccatgatcctgctcagccgtataaaagccctgatagctttatctccaggacactatacaaaggaaactagygtttatttgatgcttacagcaacattcttctggtagaaaaatgagaaatttctctgttcagaataatggtaaaatacttgaatttttcttaacaactttacacgtgaaaggtggagcagacgtatttattttcaaaggtgaaaagagtgatgctcatgtcatttagtcacaactctagtaaacactggagtcaggattaaacaaggagttaagataactaccttgtaatggtggcgtcttgaaagaactctaaaccattcgccagggaagagattagtataatagacattgatttctagagaaaagtttcaaaagcaaacatttccagatgtatagttggtggggtagtttttagaaacaagtagttaaatccttgaatactgaaaaggatggtagaggccactggagaatacataatagacagtcagcttctgaggtagtgaaaatgatttcccaaacaatgakaacagtgtttgaacttttaaattttgccactggtgcctttacttcttataattgttgttaaaacctgccaactctatgtatgtttagttgaagtcaaggtttactggctcataggccattattgtctttattacaggtccaggtctacaggtatttgattcacacactaaatgaattgcaatatttgatcttaaagaggagatataatttattatgtgacagtattttgagacagagaaattgtgtaaaagcttaaggcttatcttttatagttattaactattgtcaatacrtgcaaatatttctttgtttatggatcaaatccatctscagagtgtcacacaattgtttttgagatactcttaatctagctaatttctttctgttttcagaaactttaaaagcaactgctgttgaattttcagctttattatgcttctaggtaattmtgcgaagtggtcagccactcactggtacaaacgggaggaggtgcaaggaggacgagaagctgataaatgctaccctcagggctggaaagcgtggctacatcattgacacccgatccctgaacgtggctcagcaaactagagccaaaggaggtggctttgaacaagaagctcattatcctcagtggaggcgaattcataagtccattgagaggtaaaagattccaaagatagtacagactcttattagaagctaattatagtgggtaaggccttagccatttgaaaatcacaagtgctcaaattaacytctgcattaatttagggtcaatgatgggctagccatcttctcatttttttttggtcagctctattaaggtttgattgacaaataaaaattacatgtatttgtgatgtacactgtgctattttgatatacatatacattgtgaactgattaagtgaattaacctatcacgtcgcatagttatcatttttttggatggtgagaacatttaatatctattctcttagcagttttcaagcatacaatatattagttttaactacagttaccatgctgtacaatagacctacagaactaattcctcctaagtgaaactttgttgttacctttgatcaacatstccccatatctgtgtccctcctaccccgacccctcctgctactttctcttcctctggcaaccaccattctactctctgtttctatgagtttaacttgtttagattccacatataagtgagttcatgcagtgtttatctttctgtgcatgggtgcctgacttatttcatatagcatgatgtcatccaggttcatctgtgctattgcaaatgacaggcttcccctcttttttatttttattttatttttttgggatggagtcttgctctgtcagccaggctggagtgcagtggcacgatcccagctcactgsaatctctgcctcccaggttcaagtgattctcctgtctcagcttcccaagtagctgggactacaggtgcctgctaccacgcctggctaatttttgtatttttagcagagaccaggttttgccatgttggtcaggctggtctcgaactcctgacctcaagtgatcctcctgcctcggcccctcaaagtgttgaaattacaggcatgarccactgtgcctggcctaccctcttttttaaggctgaatagtattttattgtgtattgtaccacattttcttaatccattcatccattgacgtgcatttaggttgaatccatatcttgactattgtgaatagtgctgcagtgaaygtgggaatgcagatacctctttgagatcctgatttcgtttccgatattcaaaatatttacccagaagtgggattactggatcttattgcagtttcatctttaatgttttgaggagcctccatactgttttccacagtggccatactaatttacattcccaccagcattgtacaggggttcccttttgtccatattctcaacaacagttgttaaatcttgtctttttagtaatagccattctaacaggggtgaggtgatatctcattgtggttttgaatttcatttctctgttgatgagtgatgcagagcattttttttttcaaatacctattggccatttatatgtcttcttttgagaaatgtctgttcaggtcttgcccattctttaatcaggttttgtgttttcttgctgttgagttgagtttcttacatattttggatattaaccccttatccagtgtggtgttcacaaatgttttctcccattccataggttgtctctttactctgttgattgttttgctgtgcaaaacttgttagtttgttcagtctcatttgtctatttttgcttttgttgcctctgcttttgaggtcatatccaaaataacttttcccagaccaatgtcaagaagctttttccttatgttttcctctaatgatttttacagtttcaggccttatgtttaagtctttaatctactttgagttgatttttgagtatggtgtgaggtaagggttgagtttcttctgcatgtgcatacccagtttttccaccaccactcatgggagaagctcctttccccattgtatgttctcrgcaactttttcaaacatcaatttaccataaatgcatggatttatttctgggttttattctgttccattagtcaatgtgtctgtttttatgccagtgccaagctgttttgattactttagctttgtagcatattttaaaatcaggtactgcgtgaggccatcaggaccagggcttttctttgatgggaggtctttttaatctccttactcattattggtctgttcatattttctttcttcatgactcagtyttggtaggttgtatgcttctaggaatttatccatttcttctagattatccagtcaatttgttaatgtgtaattgttcacagtagtctcttatgatcccttgtatttctgtgatatcagttgtaatatctcatctttatttctgattgtatgcatttgcattgtttttctctctgtttttagtgaaagaaccttcagctaaaggtttgttagttttatctttctttttgaacagccagcctttgtgtttgataggcgaaagctgtgctcttggaggcctgcaggagtccctttcactagcattctttctctaagccaaccctgtggtctcatcaccacaaggccagctcctctgcaggtagatcagcagttgctacactgaacagatttgctacatatacttatattttcctaagtcaaagactttagagatttaatttctccccatatcgacctattttcgcacagtttcctccacctattgtctcttgtttgtactgtaaaagagtgatttataagtgtctctaggtgggtgaatgggagctgtagctagaaaacagtgggatccaagctgggttgggtaaggctgctgatggcactgggtctctagtgttagatcggtgggaacaggattgcaaatgtaagtggtgctgtgtctcctgacctgtcatgaaacgcagggctctggcctctcctatagtcagataatccaggtatgtgaactgggtttaatctgttcaggtaaggaatacgttaccatggcaggcattttaagcctttgcaacaatgtttaaatattagtttttcaacctttaatcctcaaattatagcagggtaaatatttttatagtattttgaactacttttgctcttagatatgttggaggctgaatctttggtttggtttctttatctttctattttctgggtttgttattttttactttcttacttttaaaaggtatcacattcttcaggagagcttaatcaaacttgtggaagcttgtaatgaccaaacacataacatggaccgatggctcagtaaattggaggcctctaactggctgactcacatcaaagagattytgacaactgcctgcctagcggctcagtgcatcgacaggtaaagtgcatttcagcgttcctgagcgaaacatgrcgctgctaactrgactttgkgtttatccagacatatgtttatagattatgtgaaagtttgcagtaaattactgtgtaggctagtcaacaccatcccattattgatgaggtgtgtgcctagagtctggcatttaatagataatgtttgtttcataaatatgaaccaggtaaatatacatgtcttctatgacacaaatttttaagtactaatggacccgttttttttttctagtacacccttaaatcatgaatttgccaatttttttcttaaactgtgaaatagaatgaaaggaagttttcttattttttcttagaggagcgaacttacctccttacttttgaaatatcagcgaaaggaaacgtaattttgttacacagtaaaatgatcctttctaacctccgggatatcttatttcatactacttgatatgtgcgattacatctggatctcaagttgagaacacctartggtagtgatgttgagtatatgaagtgattttagttcatatagttaattcactcagttaaaggttgctaatccttgagtcttgtggcagaagacttgaacagaggcagaaggattggcacaaattcttgcagaagcttagaatgccgtttctaagaaggggattccactgaaacagtaggtagatataagtattatcaccacatggatagatggcacttttctttgagactttaacttgttttattgatgcttccaaattagggaaatatatacctaatttgttatggttatagagaaattcataatagaatgggttgctgaaatcatgtggtaagttagcaacagagccatcaaggtagagtcccttggggtcaagattgccaggctatccctgttctttctgttttaggcgttaggtgaagcccatttacctaataaactgtgggaattaaagaccaaggttctgtggcagagaaataacaaatacataatgattttgttaatactgagggtttttttctttttaacctaagtttaccagatttctccttacattatgagtacagaggcttctgttttttttatgaaacaggaattgtaataaacagttaatcaccacatttctcaattttgcagctgtgacagcatgatgatacagattaagacatccctcagtgcagaatgcagaacagttctcatgatttccaccttcatttagtttgagctggccacctcaaaggcagagacttccagactcttgggaaggttcagggttttggttaattttgccatgtttgrgtccctttttctgatatatattggcctattattttcacctccatacaaatttgcccttataattaattactgaaaacatgaaaatagagtttaaatgaattgaattcagaatatcccacagataattaaggtacatatgcaatatacacagaagccttaaagtacatgctcatccccttcagcctagtcattaggttttatcctgagaatggggttagcctaaccataagtgacttcagggaatctgttacttttaaattaagaacccccaaagaattcaacagaagacaaaaagctaagtacatcatctacaatgtaacaaaaattggcataacctaaatgtccaactataggattaagtaaattgcagttcatcacttaataggatattacacacaggcacaccttagagatgttgcaggtttggttccagaaaaccacagtaaagcaagtcatgcaataaagtgagtcacattcattattaatatttggttttctagtgcatataaagttatgtttacactataatgcagtctgttaattgtgcaatagtattatgtctaaaaaaacaatatrcatacctgaatttaaaaatactttattggtatttgaggttattggccctggtagagggccttgcctccccattgatggctgctgactgatcagggtggtagttactgaagctttgaatggctgtggcartttcttagacaagacagcaatgaagattgccgcatcaattgactcttcctttcatgaaagatttctctgtagcatgtgataccgtttgatagcatttttacccacggttgaacttgcaaaattagagtcagttctctcaaacactgccactgctttatcacctaagttgatgtggtattctaaatctttttttttttttttgtcatttcaacaatattcacagcatcttcaccaggagtagattctatctcaggatactacttttcttgctcatccataagaagcaactccttatttcttcaagtttcatcatgaaattgcagcaattcagtcaaatcttcaggttmctaattatttatttatttaggagacagggccttgctctgtcacccaggctggagtgtagtggcaggatcacggcgcaccgcagcctagaactcctgggctcaaatgattctcccacctcagcctcccaaatagccagtactacaggtgcacaccaccacggtcacctaattttttttttcaatttttaacagagatgtggtttctgtttattgcccggtctggtctcaaattcctgagctcaaacaatcctcctgcctcagcctcccaaagtgctgagattacaggtctgacccactgcaccyagcattttgttttttatgagatggggtctttccctctgtcacccaagctggagtgcagtggcacagccatagctcattttaacttcaaactcctggcttcaagcaatcctcctgccttgggctccataratgctggggttacaggcatgagtcaccatgccccaccttcaggttccacttctaattctagttcttttgctatttctgtaacatctgcagtgacttctccagtaaagccttatgcccctcaaagtatccatgagatgtggaatcaacttcttccaaaatctttttaatgttgatgtttttacctcctctcatgaatcacagatatttttaatggcatctagaaaggtgaattctttacagaaagttttccatttactttgtccagaaccatcagaggaatcactagctagggtagctatggccttaaaataaaacttgaaagctgaaattactctttgatccatggcctgcagaatagatgttgttttagcaggcagaaaaacaacattcatctccatgtacctctccatcagagctcttaagtgaccaggtgcattgtcagtgtgcagtgatgttttgaaaggaatcttttcttctgagcagtaggtctcaacagtggacttaaactattcagtaaactatgctgtaaacagacatgctgtcatgcaggcttcattgttccatttatagagcacaggcagagtagatttagtgtaacccttaaggcccctaggattttcagaattgcaaataatcactggcttcagcttaaagtcaccagctgcatttyttcgctgacaagagagtttgcttctttccttaaacctcatgaaccagcctctgctagtttccaacttttcttctacagcttccttacttctctcagccttcatagaactttgtagaatggaggagagtaaaggccttcctctggattaggctttggcttaaggaaatattgcagctggtttgatcttctatccagaccactcgaactttgtccatgtgagcagtaaggctgtgtcactgtatcatttatgtgttcgctggagaagcacttttaatttccatcaggaacttctcctttgcattcacaacttgattaactagtgcaggaggcccagcttttggcctgactcagctttcgacgtgccttcctcactaagcttaatcatttctagcttttgatctaaaatgagacatgctactcttcctttcatttgmacacttacaggccattgtagggttattagttggctggcctaatgtcaatattgttgtgatccctggaatagagagtctccctgaagagagagtcaaaggaacagctggttagtggagcagtgagaacacacacagcatttgttgattaagttcactgtcttatatggacgtggttcctgatgcccccaaaacttgtagaagtaacatcaaagrtcactgatcacagatcaccatagcagttgtaataataatgaaaaattttgaaatattgtgagcattactaaaatgagacagagacacaaagtaaaacatgctgttggaaaatgggtgccagcatacttaattgacgtgggatagctgcaaatctcccatttgtggaaaatgcagtatctgtgaagagcaaccaagggaagatccatgaacgagctatgcctgcaactgttattatcctagttctgaagatgacttacaaacatggaaggatacgagtgtagaataagagtgagaatagaggaaattgcctcgtattaaagctctatgtagtgtatatgtacatgggtaaaaactgacagtagtaaccaaacccgaagcttttgtgtgaagttggtggtttttattttttccaaagtttccttcattgtttcaacagaaagggtagaagaaggggaggggagaagatgtagtaaatttagttttggtgttttctttcattctctttagaataatggggtcccagacacttctgagtctcatgatgcagtggtatctttacaactgactttctagattgacacttttatgtttgttttttttcctgttgtcrtgtttctcaaagtgtggtctaggtctcattttccagwttgaattacagtttatgaaggtgtccttatagtcagctgatggtggaaaggtagagtcaaagtcagaaaaataattttagtgtatgtctatagttttgatgagaagaggctttaaccaacgattaaagcagaaagggtaaatgccttctgtgttaagagctgctttttggttttgwaaagggaaagaaaaattcagctaaaaggttctgtgaaatttgttataacttaaagaggtcttgccatgtgaaatttgagattcattatagtcgtattttttcccaagagaatcttatctatcgtatgccttagatttagatttagattctgaactctacaagtcagagcagaatgttgtactcaatacactaaataaactgaactcagtagactaaaatgttgtgctcaataaacgcttgttattaacagagttcattgaccatgttggacayttcccatttgtactcttccctgattttcctatcagggaaggagcatcaatattgattcacggaacagaaggaactgattccacactccaggtgacctccttggcccagatcatcttagagccaagaagcaggaccattcgtggttttgaggccctgattgaaagagagtggctgcaggtgagaagagctgtttgattcacagaggaactgcttattgatgctgtgatcctgctttgtgtggtagctgacataatgtgtgaaatttcgattgattaaaatttctaagttgtgtgtttaatttactgcaggacagttaatctgtcttctccttgtttctggatgtctctttgcctgtattcctcacttgacacttccttcacttaggaaactcctgttggctgtgctttatcacatacaggagaaatacaaagaatgggaagcatagtgcaatctcccagaagctgggtcttgacggatcaaagacataagcagtcggggaagggggagtggggcctgtagttgcaaggaaagcgctttaaccctttcaaagccttttgctcgtgctgctccaccctgtgaagcttccttcaaagataaaactgaatcatgtaatgttggatggctgccaaaataaaagtctcactcataacagggattgatatcctccacagagattacttttcaatatatttctactgtgtaagctggtaaataattgtatttgaacacaaatgcttacatatcttgaaagcagacatttttctggcaaaaagagtatcttgctcctctggttacaattcgcatttatcatgcactaatgctgttacgtacaccatgtccaccctgcctgacaactgaccttacctctgtttaagtcagaccatactaagtttatgctccatatttgatgaaagtctattgagctatattcctcatgatgcatrgtagacaaacaaatgagtatgactgactgatttttatgttattttaatggatatcacaattctgtgaaccactgtaaaatttctatgtcattacctttgtcacrtacagtagtagaaggacccagagacaaagcagatctgtgaaattcctagcagagtatgatttgtattaaggtcagcatttgggttctgaacaagacagtcaaatgagtcttaaatttactttggtcagtagatggcagactcttgctgttcattttgggagaagagggtaattaatgacagctttatctcctgtagaaaagtactcataaagatctttcaacacaataacttttcgtatataattagagatttactatcagagctgacattataaaggtgatcagagttccatatctgtctccacttagggtgaggcttgtttagtgtacagcacaatctacagtgttagacagaggtgatgattcttctttgtactgagagcttatgttctttgactttgctccaggttttgtagacctagaaaggtttattttgtaagtttattattgcttaagttcattattcttccatgggatattccaagggcagtgcagttcctgtggtcacaccttagccgcgcagcctcattaaggatttggaagtgtgtctttttccttagttgctgccgctatttattttataccaagaaatcattaatctgtacaacagctaccctaattatatgatgttccaggtactaggagtgtcactgtaattgtgtatagtggtgtcggtagaatgctctgtcatgtgatctcaccaggatatgactgtcacgcctccatcttccccctaggctggtcacccattccagcagcgctgtgcacagtcagcctactgtaacaccaagcagaagtgggaggctcctgtatttcttctcttcttggactgcgtgtggcagatccttcgtcagtttccctgttcttttgagtttaatgagaatttcctcatcatgctctttgagcatgcttatgcctcacagtttggaacatttctgggcaacaatgaaagtgaaaggtgagtacactgctcacatggggacctttccttttccgttgttttggctacttcctaagtagccagaatctcctaggagacsacgatttggatctatattaaaattatttataaaaaggtagaggctacagttaattataatttaaatgacctgaagtatattcttttatgagagcatgtcctagactttgttctgttaggttaaaattagtccatacgtgaattaaggggcaaccattttaaatgttaatttcttaacataggatcatagtatcttacatgtggaaaaagccttaatttataattcaggtcttccctctaattttattaagaaagtaagatccagagaagttacgtgacttttcccaggacatagagtcagttggtcatcaaaagtgtggcctagagcagcgatccccaaccattttggcaccagggaccagttttgtggataacaacttttctttggattgggtggcagcgggattggtgatggttttggggtgaaactgttccatgtcagatcatcaggcattagattctcataaggagaattctcataaaggcgcaccctagattccccacatgcgcagctcacagtagggtttgcgcttctctgagaatctgatgctgatctgacaggaggtggaaatacgcgctcatctgccactcacctcctgctgtgtggccagttcctaacaggccacggacccttactggtccatggcctggggtttggggatccctggcctaaattacaggtcttcctcctcctgctccagactttgttacacctagaaactgtcctcaggcccagagtggcaagctcaccttacagcccaggcaccatcaagtgtataggttcatttacaagattcacatcagaatgatctttcagggaggttgcctggtaatctcttcagggtacaatcagcagccttccttgcctcattgctggcagccaccattttctgaagcatgtgttgcttagccctggactgtactctggcagggagggacaggagggattggcaatttctatagccaaggaagtttggtgaatatgacataatatcctccccacttrgaggggaggattaactcccccacttagaagggaggatttaatgattaacgcataatcattaaaggctttaagacactcttcagtaaagcaatgtatataagtttaattcagcatttaagaaatgtgtttgatgatgaattttttttggtgttatacctgttaatatcctcaggactagctttcaagaagggatcaaaatagattcccattctgtttcccagttggtagaggctgccagcaatgctgatgggaaggattctgaagtggtgtcaggctcagccagagcaagttcagtggttggccggccatgggcagggggcacagggctggaggcagtggatgcaataatgtcctgtccttgtcatccctggttcctgggaacatagcgtgggacatgctatcccagcagttaaastccaatgccacataggctctatgattatgtggattatttttattgctagctcaaaaagaatgcagtaagttgcacgtagctcataaataatcatgtggtttcagagacaaaactgattttataataaaatctcagcttaaactgagtcttatgagaattgaatgtattatctttttggttgatgtaaggtttaccacagactgtctttcaatctgtgttaaaatgtatttttttctaaaacatgccgatcgactrttatccttctctaacagtttattcacatgataaagagtgttccagagttttagaattattatgaagcctgttcattgtatgtggatatagattaaatatgtatttatgtcaagattcacattgatttttcatctttgacaatctgtattttatgtacatgtaagttattttccctaaaagctaagtctctaaaaaattttaagttttgtttgagatttgactcaacctccacttttaatattartatgggcgtaagaaggatacagtggactttggggacttgggggagggacagaagggggacgagggataaaagactacaattagggttcattgtatactgctcggatgatgggtgcaccagaatctcacaaatcgccactacagaacttactcatgtaaccaaataccacctgttccccaataacttatggaaaaattaaaataaaaaattaaaaaaaaaaacaattagaaagtggttatcaaacaatgtaaataatgaagaccctgggggtctttccagacattcatatttgtaagctatcctggttgtttctgcacaacaagccctttcttaaagaaactagaaaaataaataggacataaatgtcaaaaagtgtataatttttatgtttatattataggcttctcagaaacaaaaaggttagaaagtttttttatgcttagctatttttaattaaaatagaatcccaaatataacaaaggacttttgtgtacagtaatgttctctgggttaaggtttaacaccaaacctgatgtgaccagattctgtttttatcctcctgccagcttcttggaagcctgtaaaatactctttgttttgttgttgttgagagttctaatgccgattgagctttttgacaaatctattgatttttcaacactttgtttctctaccaaaagtcttgtattctatcttctttcatactgagaagaaattgtcctmgtaagaggagcactcaataatggttgttataaattaattactttaatggcagtgttctttcttgatcagatgtaagttgaagctacagcagaagacgatgtctttgtggtcctgggttaatcagcccagtgagctgagtaaattcaccaatcccctctttgaagccaacaaccttgtcatctggccttcagttgctccgcagagtcttccastgtgggaaggtaaaccacgcatcctttgcaaacytcttaacggtcaggtgtgcatgcggctgcctgtgagtrtgtgctgttggtgatgtatgaagatggtgagctggaygtggccctcagacctgtgtgaattgtcattctcagtgtgggcatgtttttctctttcaaatcagttatctagccacactttttttttttttcagttaccattgagaaattaacagtgtttctttacattgctgtttatgttggatatttttctagataagaaagtaccttactctttgcctaagagagttggtaagtagttgggacatgaataaattgtaagctcatcagggagagtttctgtcccttaatgaagcagtcattaggataggttcttgtattaaatggtattaaagagttacatggctgggcattccagtaagtttctataaatgggcacaaaataccatcagtgcagtaacacagatatttcattgttcttatgggactatatgcttaatttttaaatctattctaaagtagattttttatatgcactgatttttccaactattgaagcttatccccttaagtatggaagcttattaattaaaacataaccaaaatctggccaggtgtggtggctcacgcctgtaatcccagcacattgggaggctcaggtgagtggatcacttgaggtcagaagttcaagaccaggctggccaacatggtgaaaccccatctctactgaaaatacaaaaattaamcaggccaatttggtggtgcgggtctgtagccccagctactcaggaggctgaggcaggagaatcacttgaatctgggaggcaaaggttgcagtgagcagagatgatgctactgcactttagccagggtgacacaacgagactttctcaaaaagataaaaataaagataaaaataaccaaaatctatctgaactatatagtgtttcattaaacaaagcctctaaaataccatttaatttttaaagttattttgaagataataagcacacatttattcatgtttatgtttaatagcataaagtatacatacaagaatggtagctgtttgttaaattaaaccgaattaccgttaatgccagttgttacgccgtattctagtatgttatactctcaaaggcagttcacgtgtggaaaamtatttgccctttgtggaaacgggtctcagattgctttggcttctgagtctgagaccaaatcagtttctgtctcttctctggatgtcagctgtcacatctagttcctcttggcttatctgccattagtggcttccttccacctcagttcatgcttctaatcttatctattgaagtgtcccctagttagcattgtggggaaatggtcttagatggtcttgaggttctgggtgtgagctttagtgctttgatttgtgaagggatggtgactgctcagaacttctctttgcttactttcgtgattgtcgtcacagtcagtacagggttcatgatctcttaaacgagaggttacagtattcttcctgtttaggacttctgggacaatgtacttaaagccactgtcacatttaataactgaaatgagcgtagctgtttgggagaaaacccacattgggagctgggtggcctgaaggatgatttaattgctttgtaccaaacctccttgtggagcttagagataagtgatgggatgaaatccttgttctgtggattaagtcctgccatgccggmgtttcagtgtgtgtttcatgctcctcaacctagagctgggagaagaagaagctctctattaggtaaaatcctatggtaggcatctatattgaataagactgctcttcggccttaaaatatctctctgctgtttacatttacatcacagctaaccattaatatttagaaattcctgaattagaaaaatcaacatgggtgggtcaggctttacgctgtggttctgctttccctttctgatacagcctgatgttgggagctgcatagaagggctcattaggacccatggcagtttggtttgtagagagtgttttaatgaatcataaaacctttgtgaacttgccatccactgacatggtgcagcctggaagattttcgtgcctcctkacttgagtaactgtaaggcattattgtggtgtgatacagttaacatagggctatggagaggagaaaatatttccttttggttcataataaaaggataattattattatttggggaaagaagaaattgcctgcagaattgaaagattgcctctcaagtaacagggagagaggcatgtaagcacgtgggctacagttcaggctttcaaataacaacatatgtggttctgcttttactgtagttgtcacttttcaggtgaaaatggcttcacacatttaagggatcttacatgtctgagcaatattctataattataaaaataagtgatttatattgtgaaattggaaagtttatgacattgcaaattatcatcttgttttcctgaatatatcataaaatggtatttggatctatttgataattttgtgggatatttctgaagaatcartgagcatgtacatacaagtagtgacttctcaaatattgtattcaattgcatccttttcagtacctcaagattcctgtatattttagagtataataaaatacagatgtgagttgtggcaacaaaagaaaaaagaatgtrtaatacataaattacatcttatccacaaatgtaattttaatccattgtatatacctttcttgcttctgttttccattcctggattcaataggtattttcctacgttggaatagatcctctaagtatttggatgaagcatatgaagaaatggttaacatcattgaatataataaagaattacaagcaaaagtcaatatccttcgaaggcagttggcagaactggaaacagaggacgggatgcaggagagtccctgaaaggtctcctcgcacccttcgcaaggaccttcttgggcctgtgtccgccgttctctccttgtgcccttcagttcacttttacacggtagccttgaagtgaaggctttagatgtgggacccccctaatgtaatggatttctcaatactgtatgaataatgaaacttactatcataaaccatgtttcatgtggcctgttagggcctgtcactttgggagccggaaggaggtgctagtcattttatttttacgtgaaatagatgacctatttaatgccatttgtgtttcatgccattttatccaaagctttttstctgtgtccactctccaaacagcattctagagcagtcaaggagacagctaatctctctagggactatttggtggtttaaaaaaagggtcagacttttaaacactctgaccatagaaatgtttttcaaaatggcaacaatggataaaccaaggattttgtgtttaacaatccatttccagtgtcttcgccacataaaatagccattttctttaaaatagttttggactaacgaagctgaaatctattctcattcttgtttgtcaagaaaggaaaatctgttattcaaggtaaattatttctacaagggcaacaggtatggtcctccgatatttacattaagaagagttaaatttattttaacgtagacactaaaagtatgtgcaatatacaattaaagtaggaatttgttactgattgagaattgttactggtgaattggttttcaggttttgagcatacatatacaatgtgtttcaaatgctgcttgtaaaattaaaccatcatctagaatagagttaatttattataatcaagctacaaataggttttcttaaaccagagatgcactgcccttgtctaaagttcttattgcactggtttatatgtgtatgtgtgttttattgtgtgtttttttaatttgtaagtattctaagagtttcctaatactaaggttaaaattttcatgttgacctgagccttttgcaaatttgctttggctctattgatttgtccattatgtgttaggcaaatataacttaagtggagggggaagtttatgaatataatatagctctgtgttttaaacctcaraaacagatttgagtgtttcagtattatagaaacagtgatgactattcatgctctgctagtctatgcctgcaactccaaatgtttgtggttcagtatttcccacctacatttctgtttggtgacattgctcattttaacaaatatgaccgagtctagtttttctttaaaaggatagtttatgagtaatctttaaaaccatttccataccatctgtatataaccatttcggtagagaacacactacactgaaccctgctttagagctgtgtgttgagctaaaaatataattttttaaaaattgactagcaaaatctatggccacactgagaagcctttgaaaatggcaaatacttttcatcaccaattgcccaattcatctttcttctgcttcctcagccttgtagcaaaggctacacagcagcccacagtccacagtctttttgggaaaattggcctgccaccttctttaagctcagtttatttttgacttactttctttgctgtagttatgaaccttggggcattaaaatcccatggcaaggagcataagagatgttctcgtagctctgcgttgtgtgaaatgtccatcttagttttgttaaaaaaaaaaaaaaaaaaaggaaacagcctcacttttttgtgctccctcagaattgcttgctatgtctgttaatacagctgagctttttgttttcttctctttttgtctcaagattgtatatgaaggagscttttcttctcagctaacaggcatataaggaaaamcatctagagagttttctttagaagtgactcccattagcctggtgtggtggtgtgtgcctatagtcccagccactaggaaagctgaggcagaaggatcccttgagcctaggaggttgaggctgcagtgagctatgatcgcatcagtccactccagcctgagcaacagagcgagaccctgtgtctaagtaaagaaaaagccagaagtgactcccactgcttctgttgatcggccatagggcttccatgggtggaaacttgtgagggagtttgtattaggtctggtcatggagggatgatgtaccatcaaggtagacccatcttcctgatgcacatttgctgtgcgagccagagtacagtcataacacggtattcgcatttcgttttctctgtctcactgagacaacaatctatactgttttggcaagtttgcattttagtattaatttataattagggattgttcaaacttcagatctgtttacaggttgtaaaaataaacttcggtatcagtgcatctacagaagtgttatttggtaatccaaatattagagttttcccaaatccaaaaacggtcagaaataagtccattatcaatataatttgaagaagatttttagtagtactgtgaagttcgtgcttacctggatgagaagaataaatgacacggatacactcctgagaagacactcgttaaacattgcatcggagagctgcctttgataaatgtgctgttaaacacttgaatgaagagaatggtggcagaatgagtgagcaagcagattgccccagaggggccggtaataatcacgtgagggataatcagattcctgcgtattcagcatcttctctattcatgtggagtgaaagctggtttttatacaggagatacgtraagtaggccccacaaataatatttttaaaatacaaaggatcaccacaatcctctattgaacatataaggatcctcagatttaaataagtactttttttttttttaatcagaagaacattgttgtttgattatatgtttttaaaaacctgaagcttttttggtggcaggacctttcaataaatatttatttggtcaaaattttttattttgattttattaaatgggaagaaagcaagcagaaatagtaaaattcagtaggtttaaaacaatctataaatgtattttatttccaagaaaacttagggtctcaaagcaagattttaaagtgatttttgagaagacttgggggggacaataatagacattcatgtcagatcccatatgggggatttttaaacatttctttgaactttgaggcctgatttagggrtgggattttattgctttttgttttaaaggatgaaattttgtggggttttagtctttgattcagtcagtatttggtttatgttaaataaaaaatcagtatcatggaaaagatatgaccataatttagtctcctcaagtgaaaaacaggagtaatgtttcgttgcactttgaaagatctgcttcaaggcataactcgtgtmgttgtctggtttcagggatagctgtttgaattgtcattctaaagtaggtcatcaggttcacttattatccgaccttaatctgggataaaggttttggtatttgcccacttctagatagaatgaatgaaaacaacacaagcgttttatgagcactctttatcagaaaggtatttcctggaccagaaatgggcaatagttacaatagttgatcctctgttctggaagctttgaaatttatcagagaatgaagtcattcagtacatctgataaakttttgttgttgttgttgttgttgttgttttaattgggcaaccctcagaactgaagaggttcagagaactttccaggtttatactatacctcaagaccacatagattagctactgcttattctttcacatgggctaggcctgttctcctcctccagacctagtattctaagttattaccacatagtatttttatgttacccatcatctttaaaaacattataggctgggcatggtggcttacgcctgtaatcccagcactttgggaggccaaggcgggcggatcatgaggtcaggagatcgagaccatcctggctaacacggtgaawacccatgtctactaaaaatacaaaaaattagccaggtgtggtggcgggcgcctgtagtcccagctactcaggaggctgaggcaggagmatggtrtgaacccgggaggcagagcttgcagtgagccgagatcgcaccactgcactccagcctgggcgaaagggcaagactccatctcaaaaaaaaaaaaaaaaaaagactcatttatccatttacatttattctcagatgataaaatatatactgatactataactttcttatggtatcagttttctttattttcttgaataaaattacttctaccttcatttggtctttataatccactgtccacagcatcttcctttaaaccaatagtcccagaagagaccctctgaaattctaggactggatattaaaatgcctgaacctgttatctaaatcctttttaagaaacttaatgttccagctcttgaactacactgtggaacagtaatttgtgcccaatttagtggaagataatgaggctcactgtaaacactacattgtcctgcaaagtaattctgatgagagtttactgacttctagagccattctctttaaccgtstgcaggtctaaggattaactatatttgtgatttgtaataaaactgarttgtacaacactgcctgtgtttgtctggccaagacatttgcttcacttttaaaatgcacgttatctttggagaggtgaattattctacaaaatgcaccctaaatctcattgtttaaaaccttactgatctaataccatctacacaaaaaaatgttgtasttgcagaacttagtttataaaaacaaagaatgtgtatttcttcaatagccgggtatttggattgttctcttgataatatttgaatgtgactcttggatttaagtgcactattattcatggcttatacaataaaattgcactgtatggcaaatatgtctataatgtatgctttgctgaaacctcaagagtgctgtaaggtacaggtttccatattgtgaacctgtgtacgcacacacacatatacatacagtcttagggaaaaaaaaaagcagaacttttgtaagtctgtgtaacattttaatattgtttgtaatattcactaggtgataatttcccctgtaccctataactgtaatcattcaccttgggttggccggtttgtcaagcttggtttactgaatcaagaaagagtcttgtcgaatgtggtactgttcttagtgtgtaatatttgcgtatggtgttcctctgcctcagaggacagttgcacagatggctagtgttaaatttctatagacgatggtaataaaatctgaatatatttaagtgctaataaattaaatctgtgggcttatttgaattttttttcaaatattggtgaaggtttggatggtgtttcaattaaatctatatattttttaccttacattttgaaaaaattgagatctgcaaaaaggctgcaaaatagtacactgatctccctagattgttcctatattgaatgattggtaaaattttccatatttgctttaataccacgtgtgtgtgtgtgtgtgtgtgtgtgtgtttgttacactgttattttgctgaaacatccgagttagctgcagacattgtgaccctgtcttctaaatacttcacaggaatctcccaagaattaggaatatgtattctacatattattgatttagtatgtattaatataaacacatgactcattgagggtaaaaggaaagctctttcttagagtagaatgccagctattaaatgtagaaagaaaatggaattaaaaagccactatttggcatattattacagtaatcattgacttaggcaatgcctaacagtgaatggcaaaactagcaggtgaaaatttgtgaagaacagaatataatctccaaatagccttccacaaaatagttactagttacaaaggagaaaatactaactttatagtgaaaggaactggtagatatcaccttatttcaggaaaagttaacatcattagtaatgggacatatcaacatcatgtgccttctgatatgatccatccagaaacagcaccactgttggagggaaaaagcagtcttaggagttttatagtttaaaatcttacatttagatcttaatccattctgtattaatttttgtataccgtgtaaggtaagggcccaatttcattatttgcatatggatattcagtttttcccaacactttgttgaagagactgtccttttcccattgtgtggtcttggtatctttgttgaagattatttgaccatatgcatattcatttctgtgcactctattgtgttccattggtgtatatgtctgtgttaatcactggaaggctgaggcaggaggatcacatagggccaggagttcgagaccagcatgggaaacataacaagatcctgtctttacaaaaaataaaaaaattagccaggcatgatggtgctcatctgcagtccttgctactcagaagctggagtgggaagatcacttgagcccaggagttccctctccctctctttccatggtctccctctgatgccgagccaaagctggactgtactgctgccatctcggctcactgcaacctccctgcctgattctcctgcctcagcctgccgagtgcctgccattgcaggctcgcgccgccacgcctgactggttttcgtatttttttggtggagacagggtttcgctgtgttggccgggctggtatccagctcctaaccgcgagtgatccgccagcctcggcctcctgaggtgccgggattgtagacggagtctggttcactcagtgctcaatgttgcccaggctggagtgcagtggcgtgatctcggctcgctacaacctccacctcccagccgcctgccttggcctcccaaagtgctgagattgcagcctctgcccggccgccaccccgtctgggaagggaggagcgtctccgcctggccacccatcgtctgggatgtgaggagcccctctgcccggctgcccagtctgggaagtgaggagcgcctcttcctggccgccatcccgtctaggaagtgaggagcgtctctgcccagctgcccatcatctgagatgtggggagcgcctctgcccggctgcgaccccgtctgggaggtgagaagcgtctctgcccggccgccctgtctgagaagtgaggagcccctccgcctggcagctgccccgtctgggaagtgaggagcaccccgcccggcagccgccccgtctgggaagtgaggagcgtctccgcctggcagccgccccatccgggagggaggtgggaggtcagcccccgcccggccagcagccccgtccgggagggaggtcggggatcagcccccgcccggccagccgccccgtccgggagggaggtggggggtcagccgcggcctggccagccgccccgtccgggagggaggtggagggtcagcccccsaccggccagccgccctgtccgggagggaggtggggggtcagcccccacccggccagctgccccgtctgggagggaggtggggggcgcctctgcccggctgccccttctgggaagtgaggagcccctctgcccggccaccaccccgtctgggaggtgtacccaacagctcattgagaacgggccatgatgacgatggcggttttgtggaatagaaaagggggaaaggtggggaaaagatagagaaatcagattgttgctgtgtctgtgtagaaagaagtagacatgggagacttcattttgttctgtactgggaggggttcttctgccttgggatactgttgatctgtgaccttgaccccagccctgtgctctctggggcatgtgctgtgtccactcagggttaaatggattaagggcggtgcaagatgtgctttgttaaacagatacttgaagacagcatgctcgttaagagtcatcaccactccctaatctcaagtacccagggacacaaacactgcggaaggccgcagggtcctctgcctaggaaaaccagagacctttgttcacttgtttatctgctgaccttccctccactattgtcctatgaccctgccaaatccccctctgcgagaaacacccaagaatgatcaattaaaaaaaaaaaaaagaaagaaagaaagaaagaaaagaagcagagttggactcagcgggaaaataggcgtgctaccacctcaggagagttccagggaagaaccccacccccactccagtgaggtcacaatggctggagctctgaggggcccaggctccctgagccaggaggagaggagaaagtccaaggaaagatggctggcagtcacccctacttcaacctgcctgactccacacacccatcgccgccctccgctccacccagcctccgctggcaccagcgctgccagccctctggtgccaccaatggcctgctggtggccctgctgggtgggggcctgcctgctggcttcgtgggccccctttctcgtatggcttaccagggttccaacctgccctcgctggagctgctcatctgtcgatgcctcttccacctccctattgccctgctacttaaactgcgtggcgacccccttctgggacctcctgacatccgaggctgggcctgcttctgtgccctgctcaacgtcctcagcattggatgtgcctacagtgcagttcaggtggtgcccgctggcaacgctgccactgttcgcaaaggttcttccaccgtatgctccgctgtcctcaccctctgccttgagagccagggtctcggtggctacgagtggtgtggactgttgggcagcatcctaggactaatcatcattctgggacctggactctggacactacaggaggggaccacaggtgtctacaccaccctgggctatgtgcaggctttcctgggaggcctggcgctgtccctggggcttctggtctatcgttctctgcactttccctcctgcctcccaacagtggccttcctatctggcttggtggggctgctgggctstgtgccaggcctctttgtgctgcagacscccgtgttgcccagtgacctcctgagttggagttgtgtgggggcagaggggatcctcgccttggtctccttcacatgtgtgggctatgcggtcaccaaggcccaccctgccctggtgtgcgctgtcctgcattccgaggtggtcgtggcccttatactgcagtattatatgctccatgagactgtggcactttctgacatcatgggggcaggggttgtgctgggcagcattgccatcattacagcccggaacctcagctgtgagaggacagggaaggtggaggagtgagatagaacttgggagcccgggggttgggagggacagggataaataaagacaaagactgaagacaaaaaaaaaataaaagaaaaaaaataattataataaatcctaggaaagagtgaaagtctaacttccatagcacattataatattgagatgttcagttataataaaaatatcacaaagcatgcaaacaaatgagaaatctggcttatttacaggaataaaattaattgaactatccttaaggaatcccagactttggacttactagacaaagactaaacaattgtcttaaatatgcacaagagttaaaagacaactaaatgaaatcagagaaatgatgtttgaacaaaatgagaatatcaataaaaatataaaaattatagaaaggaaccaggtagaaattttgtagctgaaacgtgcgacaactgagatgagaaattcactagaagggttcgatagagtttgtttgttttttgttttttgctttttttttttctgagacagaatcttgctctgtcacacaggctggagtgcagtggcatgatctcagctcactgtaacatccgccttctgggttcaagcaattctcctacatcagcctcccaagtagctgagattacaggtgcatgccaccacacgcagctaatttttgtatttttagtagagatgaggtttcactatgttggccaggctggtctcaaactcctgaccttgtgatccacccgccttggcctcccaaaatgctgggattgcaggcattagccaccacgcccagccttccgtagagtttttgatcaggcagaagaaaggatcagcaaatttgaagataggattattgaaattatccactctgaggagcataaagaaaaagaataaaaatagtgaatagacttcaagacttgtaggataccatcaagtggaccaacatatggtttatgagagtcctagaaaaaagcaaaaaagtgttttaaaaatgagggctgaaaacatcccagatttgatgaaagacataagtgtacaaatccaagaagcctctacaacaacctctaataccataaactcaaagagattcataccaagacacagtatatgaaaactatcaaaaatcacaaagaatcttgaaagtagcaagagaatcaactcatcacattacaagggatcctaaatgagattatcaactaatttttaattagaattaatggaggccagaagacaatgggatgatatagtttaaatgttgaaagaaaataacctgtcaactgagaattatatatccagcaaaactgtccttcaaaaaataagggagaaattaagacatgcctagatttttaaaaagcttagggatcttgttactgcgagatatgcctgacaagaaatgctaaagggggtccttcagtgagatgaaagaacactagacagtaacttgaacccatatgaagaaagaagtatctccacgacagataaattctagggcaaatataaaaaccagtattattataactttagtttataacatcagtttttattttccataggaattaaaagacaaaaacataaaaaagcaattataaatctatgttagggagcttgttaccagtagatttgccatacaagaaatgctaaagggagtccttgaaggtgaaatgaaaggatggtagacagtaactcaaacctgagtgaagaaataaatatttctggttgctatggtttgaatgtcccctctaaaatgcatgttgaaatttaattgccattgtgatggtattaagaggtggaacctttaagagatgattaggtcataagggctctgccctcatatatggattaatgccattatcatgggagtgagttagttatcatggaagtgggttcctgataaaaaagattctgaaattcagccccggtccttttctgtctcacacactgtcttgtccttccaccttttgccatgggatgaggcagcacaaaggccctcaccagatgctggcaccatgctcttggacttcccagcttccagagccttga

SEQ ID NO: 94278 - DNA, 30199 bp, Homo sapiens
tggctggaaagaatgagttactagacaaaacatatgaagtacctagtacgcacctagcagatgttaggtacagacaaatccccatcacatcccccacctcagtgctcccaggctggtacaacttttctgagccttgcaaaatacaggtaaatatgtgggtaaatattagtagattatcaaagcacctagcacagtgcacataaatagatgcttaaataaataaaaataaattttaaaaaaacactaaatgactctgtcaccagcccattctcttcccctacccgattctaggggcacctcttaggaagggcgcccctctctcttccctgaactccgaccctgtttaatatagtatgtttacactctgccttcatcagatgctagcctgcccagtttgctattgtgctttgtcctgtttctcttagaaatctgtgagctccccaggggtgggagcagaactttggctccattctcccccacacagcagagaattgactttccrctgggcacaggggaggctcagtcaacactctatccccatgtggctacgttggcttagaggcacagaatgggagagaagcaggctcttggctgaggaaaagccctgggcgagcactgagggaagcttggcctcagacatagccagctgccctctggacctcgcagccctgctgtgcccagctcagctgctgtgtcagtgcaaagccagggtgacatcagctgtgggagaggttactgtcaggcaaagggaaggccaggagagagatggctggctggggcacgaggctagaaggactcaggaaacagttcccttgtaggggaagcagcagcttgggaggggcagttgggaggagagaagcaaaaggggtgaagggccaggaatggccagggcctgcctgttcctttcacctacagcagggagagaggcatgggttcagaactctggaagagagtgtgaccttcctgggagcactcttagcaactgcaggaagcaaatggggatttacctctctacgaccaggaaggcaacacaggagccgggcacggtggctcatgcctgtaatcccaacactttggggggctgaggcgggtagatcacgaggtcaggagttcgagactggcctggccagtatggtgaaaccccatctctactaaaaatacaaaagttagccaggaggggtggcatgcacctgtaatcccagctacttgggaggctgaggcaggagaattgcttgattctgggaggcagaagttgcagtgagccaagactgtaccactgcactccaacctgacaacagagcaagactccgtctcaaaaagaaaaaaaagaaagaaagaaagaaaaaacgcgggggcaagctgctcttctctctttactttggctcagaagctgagtcagggcaagagagactttcccttcagcttgtttatttgttgttggaggccctaggcctgtgtttgcttttcctctccatgtgttcatcctagatggcttgctcagaatggggtagccttccaggctggggaaagatcccctatgggcctccagaggagggagggagtagtctgtggcctgggaaaaggcatctttgtaaggtcagaccactgcagaaatctctggccctggtcctggtcctaagacatttgtccccaggcctcatctgctgggactgtcagtacccatctcacacattctgccctgagacataaactgcttccagtcacacgcactatctgatctgaggacgtaccccagggccccagggataggtaacaataagttggtggaggcccgtccgccagtatgcatacctgtgtgtgcagacattcccgtgtgtgagcacacacagaaagggctggagtgagaggaagatcatggctctgtggatagtgtggagagacagatgtctgccaacagagggaggtgtggggctagtgcactggcctcttctctaccggggaaagacgtgctacaccatctatccagcctggggcccaggaggagccatattcaagggtcctcgttcatagtatatcaggtcagtcttttcctcctctaggtctctgaacttgccaactgcccttctccacactcacccttaatggtcccttcggatttagcaccgtctcctccgggaagtcttctctcgttctctggagctggtctggagtgtacctttcctctggagcctatagctcaatcatctagagttataaagatacagtgrctgacgcctgtaatcacagcactttcggaggacaaggcaggtggatcacttgaggtcaggagtttgagaccagcctggccaacatggcaaaatctcatctctactaaaaatacaaaaattagccgggtgtggtggtgcacgcctgtaatcccagctccttgggagcttgaggtaggagaattgcttgaaccccagaggtggaggttgcagtgagctgagatcgtgccactgcactccagcttgggcaacagagcaagactccacccccaccccccrggttcaagcgattgtcctgcctcagcctgcctcagcctcccaagcagctaggattataggtgcccgccaccaccctgggctaattttttgtatttttagtagagacggggtttcaccatgttgcccaggctgatctggaactcctgaccgcaggcgatctacccgcctcggcctcccaaaagtgctagcattacaagcgtgagccaccatgcccagtctttagtttttttttttttttatacttttcttattgagatataatttatataccatagaattcatccatttaaatcatacaatttaatggcttttagtatattcacaggttgtgcatccatcacaatccattttagaacagttttattactccaaaaataaaccctgcattccttagccatcaccccccaacatcctccatcctccttccaagccctgggcaaccaccaatctactttctgtctctataaatttgccaattctggacatttcatataaatggaagcaaacaacatgtgagactttgtgactggctgctttcacttagcattctatttttaaggctcattatgttacagtacttagcagtacttcattcttttttattctcaaatggtattccactgtgtgggtatcccatatcatattattagagacaggttctcactctgtcacccaggctggagtgcagtggcacaatcatagctcactgtaacctcaaactcctgggctcaagtgatcctactacctcagcctccagagtagctaggactacaggcacacacagccatacctggctaatttttttttttaattttcattttatgtattcattttctttcttttttgttgttgttgttttgagatagggtctcactttgttacccaggctggagggcagtggcatggtgacagctgagcagccttgacttcctgggctcaagtgatcctcctgcctcagcctcccaagtagctgggactacaaacacgtgtcaccatgcctggctgatattttttttcttgaaacagggtatcactctgttgcccaggctggagtacagtggcgtaataatagctcactgcagcctcccctcctgggctcaagcaatccgctggcctcagcatcctgagtagctgggactacaggcttgtgccaccaggcccagctaagttttaaaaaatgatttttggtatagaggaggtcttgctatgttgctcaggctgtatttttattgttgagacaaggtctcactatgttgccatgatccccccacctccacttcccaaagtgctcatcttatctgttcattagtcagttgacagacatttaggttgtttccactttttgaccattatgaataatactccagtgaatattcatgtatacatttgtgtgggcatatgttttcatttctgttgggtttatatctaggagtggaattgctggatcccgggtaatattttgacaggcagagttcaggggaagaaaaacttgggaaaatgaagcatgtttagaaatcagcaagagtgcaggggtttttcggagttttattttatattctgttgacaaatgtgcagtttgatgaagatacaagttatactaagtgagaagtgagaattaaggctggaatagggcgttcagagtaaaatcatgaagcactttgaataccaaaattaaggagcttggctgtaaacaaaataataaaaaatcacaattttttttttttttttgagaaagagtcttgctctttcaccctggctggagggcagtggtgtgatctcagctcactgcaactttcgcctcccgggttcaagcaattctcctgcttcagcctcccaagtagctgggactacaggcacttcccaccatgcccagctgatttttgtatttttagtagagatgggatttcactttgttggccaagctggtctcaaactttttgctgtcataattgttgtaactattgttccttttgctgaggtagggcccccagaccaaaaaaaataaatcttagaatccaaatcagtgtgttggtttgaccactgtcacttgagaaccacagtgtgaccagggcctcaggagtagaggtgatctctgctcgaaagagaaatagaatgaaaatattctccgggccaggcgtggtggctcatgcctgtaatcccagcactttgggaggccaaggcatgtggatcacctgaggtcaggagttcaaaaccagcctggccaacatggtgaaaccccgtctctactaaaaatacaaaaaattagctaagtgtggtggcgcatgcctgtaatcccagctacttgggagggtgaggcaggagaatttcttgaacccgggaggcagaggttgcagtgaagcgagatcacaccactgcactccagcctgggggagagagcgagacttcctctcaaaaaaacaaaaaacaaaagaattaagcaaattagacattgcagagagaacctgaagggggtcagaccacgtacagatttctgtgccacatgccaagtacttctgaggcatgactggatgagctgtccacatctgaaatcatccagtcttgttcagaactttcacaccggacagggagccaggactggaatgcagtctcctggtcactggccagagagttggcctgaccctgagaccagtggccaacaaaggagctgcttagtctacctcccaggaaatcccaggtgcttgtcttcctgggaagtgaatcattggcgcagcactccgtattttctcctcttcccaggggaaggatcctagggcagtatttgggaaagacatgggcatggaaggacaccgggtgaatgcatagcctgcctggttctgagctctcatggtaaggctcctacagacacggaaaagatgggggcacagggacagatcagtagggtcagagcatctcagggaccgagggcaatatggtcctgagcagggattaagagcttgggctctcatatggtgtttctgggctcaactgccagctccatcacttactggttgctgtgaccatgggcaagttattccatctctccatatctctttcctcacttttaaaatggaataatggggtacccacctcccagggtcacagagaggcttacagaaaacgattcttgtgaattggcttgcagtaataattcaatacctgccagctattcttattccacatccaagccctttcgcctgctgctgggtgaaaacacatgtcagtgtttcctgacggtttccacaaagaagattccaaaattacaacctgccagtctgaagaatctccaaaacatcccgcacgcatcctggaggcgcggscttggggatgggactgcccgcccgggtcctgaacaggatgcgtgcgcgcaggcacacacacaccagccagcctgtgtgtgcggccggagtccggtgcggtcccgggtgagcagcgcgtggctggtgggcggggcagagccattgttcgcaggcgtaccgagtcccccgcgctcgcccgggagggaggcggggcttcccgcgtcccccaagctccagatcctggggtggctgccacgtctccctgccacgcgcctggggggacgggaagacgggacggagatgttagtggtgggcgccccccgagggttcaccactgtttcctgagaaacttccccagtgcccacccacccgttctccgtgtgcccgagggccggtcctgggctaggctccgcgccccagccccaaaccgggtccccagccccttccagagagaaagctcccgacgcgggatgccgggcagaggcccagcgrcgggtggaagagaagctgagaaggagaaacagaggggagggggagcgaggagctggcggcagagggaacagcagattgcgccgagccaatggcaacggcaggacgaggtggcaccaaattcccttcggccaatgacgagccggagtttacagaagcctcattagcatttccccagaggcaggggcaggggcagaggccgggtggtgtggtgtcggtgtcggcagcatccccggcgccctgctgcggtcgccgcgagcctcggcctctgtctcctccccctcccgcccttacctccacgcgggaccgcccgcgccagtcaactcctcgcactttgcccctgcttggcagcggataaaagggggctgaggaaataccggacacggtcacccgttgccagctctagcctttaaattcccggctcggggacctccacgcaccgcggctagcgccgacaaccagctagcgtgcaaggcgccgcggctcagcrcgtaccggcgggcttcgaaaccgcagtcctccggcgaccccgaactccgctccggagcctcagccccctggaaagtgatcccggcatcsgagagccaagatgccggcccacttgctgcaggacgatgtgagtttcccagcctggccccgtaccgccgggtcgcaggcgcgggctgggcttccaggggacgggttggtggcagaagagaggggagagctccgcggaggacttggtcatctttttcgagttgtgctgccttccgtgagttgggaatgtggattgtaatttggggacttgagtctccaactttagtttcttaagctttaaagaaaaatccggtcgtgctggtgcttttatgaattatgcgggttttcctttgtcttcgtggggatgtgagtgctttacttctccttcctactgccgcctcccgataggtttcgcgcccctcgtccccctcgccctccgcccctaatgtatctgtacagtttcagggaacttttctccgttgcgtctcggatacaccctaccctcagtgaactacggcgctgcggaagggtccgtactgtccacccttcccccagcgtgattagagagcggagtggccccagctgcctccacgtgtctcttctcctgactctcctcttcctcccccttccagatctctagctcctataccaccaccaccaccattacagcgcctccctccagggtcctgcagaatggaggagataagttggagacgatgcccctctacttggaagacgacattcgccctgatataaaagatgatatatatgaccccacctacaaggataaggaaggcccaagccccaargttgaatatgtctggagaaacatcatccttatgtctctgctacacttgggagccctgtatgggatcactttgattcctacctgcaagttctacacctggctttggggtaagcagcctccctgtcctcctgacctagtcctccaggtactcactgctcttttaataaggtaggatcttacagaggacaccagcccctcccagcctcccggttggggtttttctcaggcatttctctttggttgcttcaggcctagtgggctgggaagaacctgggggtactgagatgcaggactgtcaatgctgggggttgagagctttggaaccttgtgcttgtgggctttgaagtgtgctgtgctggaragtcagctttccctgaaagagcttttctgtttgagtcatttgcttggctgcctgtcccacccctgccagccacaaaagaatcaaacccctctacctgggaggcatgggaacatggtactaaaccattggctttctagggtttgtgttgagcaatcataggctagcrcaagggaaactactcagggagagagtttattggaaagggaggagagagctcattggaaagagaggaaaagagaggttgttatccacaaaactattttgacctgaccccttggccagaccaggcttcttcgttacagaggaagatgaagctcccgtgcaacccaagtcacacaggtgtgtgttgctctgttactctacattccagggtgctgcacataccagtcaacaaaatgctcttagaatgaaatcaggctgaagatatgtttcatgttccatcccccgtccagcctgcttcaggcccccctactgatgccatgaagtgccaagaattctgcaccttccaacaccagtcctacccatccctccttgccagggacatcgaggccaggccagaaaagagagcccggtcttgaggctgctgtaatgagggagacagttcccagtttgtccccgacctgcccttagctcagctctttcagggacctgttggtgtggcctgatggcatggccctgccccctggatacacacatgcgctttgcaggctttttcacctctgtcactatgagcctaagttgggaagggaaagcagggagctctgcagatccaggggccctgcactgctactctctaaggggtggtgagccaggacttctggtgtgggaaactttctgacagctcrctcttgaagggtagttatgcagaagggctggtaggccaagttttagctgtttccctcaggacctcttaggtcttctgaagatggtgagatctggttcattgagcttttgtttccagaaatcctccaggtgctacagtgaaatgcaactgagaagagcccctttgtcaggatctcagtttttctaggtaccacctgtgggcaacagtacttttttaggatggggaaggtagcattccttgggttacatatgtgtcacagccgcagagacagaacaggccaggtgcagatcagttcatctgcataccaggaagagctcttgtatttgtgaggggagggcgacatctgttgtctagcccctctgaggatccagcagaacttcagttgcagctgagggatgaggagcagggatagcattccccaggcagtctgtggatgcctctctccaccctttctccccaagaggatagtcttcacaagtagttttctctcctgcaagctccttccagcctcagcaccccctgtaggtttcctgaagcccagagtttgacccgattgcctctgcttggttatcctcagttgctactgcaaggagcagaattccatcccaaagtgaaggctgtgcctgctacatttttttggtgacctgcccatgggtgtgtgctgtgcccttgggcagataaatgtggctcacagagactagatggtaacttattttactgggccctttggtggatggcttagctgaaagaatgaccatgtcgatgtggggatatcagaactcctctgtcttgagaaacaaggagggtgaggggaggagggtcagaggtctcaacttggacatcttctcttcccaccttcagaatttaggagcttcacctttcttgttttaatccctatggacaatgttaaattagcaactggtygtgattccagcatttcttatgactgagcacttttgagagccttaaatctctttcattttggagtctcccaaagaagcccttaggagaatgcctctggcaacactgagagccagaggcaaaaccattyaagtctctttcttaaggccagagcaatgagatgttgcttaaccatcaatctggacattttcctcccctggggaggagagaaggaataaatctccaactgatttaagcccttctatttgataggcttagaggtgtttctagaaaaggcaccagagtgcctgagttctttccccaatttccctgttaatataggatcttatatacgttctgagtcaacactgccctagggtcttgcagcaaataacaaccctagaagctcccttgctcattagagagagctctggctcaactgatggtttcccgagtaagatgcaggtagatactgtatctggggagatgtcagtcaccacttggcttgagggcagatcacctggggcctcagtccccactctgagggaatgtggagagagctcttgttggggctgactggctctgtggctctcctggagatcttataggaggaatagaagagaagaaaggaggtagggttggggggaaaaggaggttgtttaggaaacagctatcaatggctgcaaaagaacacaggacaatttgttacaatgtgtggtgtctccaactgcaactaagttctgtggccactgaggatctattgtttctagctgtttccctaggaatgaaacattgttaasagtttctatcaaggccacagcttctgcctgctagagctactgaacagaggaagatatggggacgcccagcagcccacttcccagttagagattatatctggcacctcctgagcctgcaggcctccaggaaggtgagggaagacartggtggggtgcttcactgacagcttgaagaatatcccaccattgtctagagagcgttgcccggtgagagtatgggctgacagggatgtggcaaaggcgagacagaggagttgtgcatgtatcttgggggaggtggatggtatagctggaacgtgaaatctttggtaaagcttaagacactgtacaaattggatttatgcacagggctaatttttccctgatwtggccacactgactgcttgaatatttaaatgcttttttgtaccagttgataaatggccatagtctgaatgccctaagagtcccctacaactaagggcttctcaaattggtcagtgcccagattgtactggctgttattttattttttgagataaggtcttgctgtgttgataaggcttgagtgcagtggcgcgatcttggctcaccgcagcctcgacctcctgagctcaagagatcctcccacctcaacctcttgagtagctgagaccacaggcaggtgccaccatgccaagctaatttttaaaattatctgtagaggcaaggtctccctatgttatcccagctggtcttgaactcctgggctcaaggggatcttcctgccttggcctcccaaaatgctgggatgacaaagtggttcatactacacctggccctctgctgttattttaataacaccctggcttatgggttctgagctctgcaggagtagtttgtggcccttaaaaccttagagaaggcctagatagaggtgaaaggagatagctaggccctgggagaatgcctttaagatgaagaatgagtggtaagagcactattctctctcctgcctttctgactccttagttcctgggattctttagcttatctttttttcctgggttgagaggttggggggtgatatttttcaagtggtaaaatctaagggatgtggttatccctagagttcatggtaaagccagttctcacccaaagcctgacgaagacagtttctagcatccagagagtgtctctggcatcctttcccagatggaactcacactgattggtgactcccccactgtcttctcctggcaggggtattctactattttgtcagtgccctgggcataacagcaggagctcatcgtctgtggagccaccgctcttacaaagctcggctgcccctacggctctttctgatcattgccaacacaatggcattccaggtaagaagttgtctctgctcagctgtttgtcctccacactattaatgatccggggacagaaaggagggatcagcaccagagaggagccacacctgacagccatttcactttcctctctcctgtagtcacctcaagttccagttcagtccttaagtccataaagcatgaagagacttctgagtcttggaaaagggaactggaagataattggaaaatactcctgatgtgtaggaatatttttgatcctaaggtccctgtgttgtcacacaatctggccgttgtggctcttcatcataaggggctttggcacataagccagagactgaccttagattcctgggcagacactggacaataaattcactatttaaggtaaatatcttagggaggcagagctgggaggatcactggagcccaggagtttgaagctgcagtgagccatgatatcaccactgcactccagcctgggtgacaagaccccaactttaaaaaaaaaatttcaaaagtgaataacttaggactccaccacagtgggattgaagttgatgttcccagactcgtgaactcttattttgagataatgagagcaaacacttttattgcactgactatgagcctggcactattctaagcatttgatataaagtcctcacaaaaatcttaggaaataggtactattatccccattttacagatgaggaaaccaagttacagagagattagatagaccagcccaacattgtggccctttcttgggctgccatggtggctaagtaaaacattgaggtttgttaaggcaaaaaacaaacctgggcacggtggctcacgcctgtaatctcagaactttgggaggccgaggtgggcagatcacaaggtcaggagatcaagatcatcctggctaacacagtgaaactctgtctctactaaaaatacaaaaaattagccaggcgtggtggcgggcacctgtagtcccagctacgtgggaggctgaggcaggagaatggtgtgaacctgggaggcagagsttgcagtgagctgagatcgcgccactgcactccagcctgggcaacagcaagactccatctcaaaaaaaaaaaaaaaaaagtttatagcaaagacagaatgaagggaaatggggaaagggaatgcatcatagtcaytaagctgtagcaatgggcaaatgatagcatgtggcgtttggcttakcttggagcaagaggaagaaaggaaaccaacttagtggtggcaatatcccaagaacttgccacatttgcatgatcatctctgccatagcagcttataccttgaaggcttccaaagttgtcctgtggagcaaaaggaaggaagagagatattggtacattctttaagggatggaaaaagtcatgaagaagcccagaggtcgtttgaaaatgcagtcatgatyacgagttgcatgcctggccttgttattgggttgtatgagctcttttgcaaggcaccagaatggtgcaccctgcagctgcagcttatctactgattgagaccctaggacacaaggctgcctgcctcatgttccccatgcctagggattaggtaccccatgaggatcttttccaacattccttgcttaaagaattgcaatgttctcacttcttgaaactctctgagctctgtatgatttacctccgttccacccaccatataactttcaagaaacagcagttctattgctatggtcctgggactttaagttgcttttttctacttaagcttcagtggcaagttgggagaagaagggaggcaactccatgactcctttggagcccagattcctgggtattttgtgaggttgggctgagcgccttgggctcttgatacctgtccattgggattctcctaatagggtgtctatcctcaagccttacattcctcttctctctctccccagaatgatgtctatgaatgggctcgtgaccaccgtgcccaccacaagttttcagaaacacatgctgatcctcataattcccgacgtggctttttcttctctcacgtgggttggctgcttgtgcgcaaacacccagctgtcaaagagaaggggagtacgctagacttgtctgacctagaagctgagaaactggtgatgttccagaggaggtgagtgaagccctgatggaggtggggatatggccctggcacskggtcattagggaccccattttttctcctgmgactttcaaaatataagctgagaaatttgctgggtttgcatgttcacaatcttaatttaaaatcccaatttttaacatcccacgggcccgtagccatagactattgctccatttctttctctctgactatcttaattaaacccattacattcaagagatgtttattgtcctaggacagtcatagattcaaagatgattatagcctagttgcctaggtttgtttgtttgtttttgtgtttgtgtttcaacagtctttctctcttgcccaggctggagtgcagtggcacaatcatrgctcactgcagccttgacttcccaggctcaagcaatccttctacctcaacctcctgagtatctgggactacaggcacacaccgccatgcctggctaattttttgtggggacaaggtctcactcactatattgcccaggccggtagcttagttcttaccttcaaaaagtttgtagcctatcggggtggagagataagccaagtatccagataaccatggcataaggcagaatattttctgtactatgagargtacaaaggggagggagattgctcaatgggcaacaccaaggaagtgatatgaaataaatagtgttggaatccaccaacggatagaaatttttacaactatgtgtggggagagacagtgcaaacagaagaaacagaatgagctaaaacacgaagcatgttccagcaatagagtccttttgcttgaagtatagggtatgggaagaagtaagactggagagactaatgccattcttgtygagtcctaaaagcagacttaggacttaattcaataagcaataggaagccattacatcttttgaactgcaatgtggcatagttacggacgtgctttaggaaggctgcttttagaacaagtgtaagaaaccactgagccaaagtgagaggtagggacataagttaggtaatgaggacccctgctagcgaagcagtggcagaaatggagaaaagagttgggtgcagggaatgtcagtgatgtaaaagtcaaagacttgactgctgaaggaatgtagggaatcagtgcccttggaatgtcaatggcctggtctacattgagaatgaagactgagaaagggcttcctgagggacagagagctgcaggtgatcaaggacactcaatgggtctctgagggaaaagaagaccaaagaattagggagtagctagcagaaaatggaggcatgacactaaacacagactgaaaaagagtgctgattagaaagagaaaggagcccaaaggcagaygggaaaaccagccaaggatggagagacktctgttcattagtttgtagtttggacctcacctatcttaccaatgtggtattatgctctagtaaaaagtcagcgatggccgggcatggtggctcatgcccgtaatcccagcactttgggaggctgaggcgggaggattgctggaaagttcaggcattcgagaccagcctgggcaacatagtgagacctcatctctacaaaaaattaaaaactaaatgggcacgatggttcatgcctgtgttcccagctactcaggaggctggggtgggaggatctcttggcccaggagttcaaggctgtggtgaactaaggtcacgccactgcactccagccttggcaacagagtgagaccctgtcaaaaaaaacaaacaaaaataaataaaacaatgaacttagagtcagacaagcaattcaacatggaagaaagacagcccatcccaattagtgtggaagatccatgtaggtgtggagtccccctccattgacctggtgtctggtctgtcaatgtaggtactacaaacctggcttgctgctgatgtgcttcatcctgcccacgcttgtgccctggtatttctggggtgaaacttttcaaaacagtgtgttcgttgccactttcttgcgatatgctgtggtgcttaatgccacctggctggtgaacagtgctgcccacctcttcggatatcgtccttatgacaagaacattagcccccgggagaatatcctggtttcacttggagctgtgggtaagtcagctgtccaagtaagactacatccagtggtctgctgattaggggattaggctaggagccagaaaaactagataaatctgttttttatggctactttgtatctcagtttttccactataaaattagggggcagtatactggaaaacgcttttgagagtcaggcaacatgttttatgtaaaaatgaaaggataagaaacaaaacacaaaaaaacactgattttgattccaggttctaaaacaatttccaaatgccatgtatgctccrggcccggcggctcatgcctgtaatcccagcactttgggaggctgaggcgggcaggtcacctgaggtcaggagtttgagaccagtctggccaacacggtgaaaccctgtttctattaaaaagcaaaacaaacaaacaaaaaagaaaaccaaatgccatacatgatgagcaccttagagttttcctttctttcatcaactctgggctggactgcagtcttgcttgaggcaaggaatgcataaatagaacaatgggatcatctgagtggccagtaagcctggtgttttatgaacttcaagtatgcacacaaagtattttttatctttccactctactcagatatgccttgctttaagagtgtgccgtgccttactgtttggtgatgccattatgaagggcatcaaaataactgctgktggccctttactaccacctaccctcttgtctcctcttgtcctctatttttctctcttctacttctattctgggctaggaacatcccttcccccaacatgccttcaggaatctcccaataaagcagtgtgatcacaagttcctgctcaattctctaatgttgatcttatcttttctcttttctttcctttcattttctttcttttcttttcttttcctttcttttctaatgagacagggtctcaccatggtgcccaggctggtcttgaaccctgggctgaagtgatcctcctgcctcagcctcccaaagtatctacatttttttctctgtccctctttccaactgaatatagactttcaccaaggccctgaatgaattttccttaaatagatctggcgacctcttctttccagtaattggtgctattggtcattcaataatatctagacaaccacactactccacacatttaggcaggtcattgcctaacactcattttctttttctctttaaaaatcttcctttatattctcaaccttaaccatctttattatcttttaaattgttgttgagacagtctcactctgttgcccaggtttcagtgcagtggtgtgatcacagctcactgcagctatgacctcctgggctcaagcgatcctcggggttcagcctcccaagtaactgggattacaggtgcatgccaccatgcttggctaatttttctatttttttgtagagacatggttttgccatgttgcacaggctggtctcgaactcctgagctcaagtgatcttcctgccttggcctcccaaagtgctggaattataatagctgtgagccactgcgcctggcctactatgtttattaaaaggatttattgcctgtaatcccagcactttgggaggccgaggcgggtggatcatgaggtcaggagatcgagaccatcctggctaacaaggtgaaaccccgtctctactaaaaatacaaaaaaattagccaggcgcggtggcgggcgcctgtagtcccagctactcgggaggctgaggcaggagaatggcgtgaacccgggaagcggagcttgcagtgagccgagattccgccactgcagtccgcagtccggcctgggcgacagagcgagactccgtctcaaaaaaaaaaaaaaaaaaagatttatttgtctaggcgtggtggctcacacctgtaatcccagcactttgggaagccaaagtgggtggttcacttgaggtcaggagttagagatcagccaggccaatatggtgaacctctgtctctacttaaaaaaaaaaaaaaaaaaaagtacaaaaaacttagccaggcatggtggcacgtgcctgtagtcccagctactcaggaggctgaggcagaagaatcgcttgaacccgggaggcagaggttgcaatgagccgagattgtgccactgcactccagcctgggtgacagagactccatctcaaaaatatataataaaaataaaagcattttttttctctctttttaactttcacatatctcttttcaggcaccttcttaccattgtgcctattcttactttaacccatgattaaaataaatcatatacactgtataaatctgagattatcataggaatggagtttctggcatgagatgtttcctgtatcgcaaatggatctataatgaccttccccacctccagcctctgggtggccatgagttcaaagtggctgccaatatctgayctgttgttgttatcattcactcctccttgcctgctgctttcctcccttatcacctcaccctttgttctcctccagctctgtttcctgccaccctaatctttttgtttcttgaattacctcccccactgtcacatgctcatcttctctgccaaattaaccttctcccttgagcctttcttgggctgtctcttgctgccccagttgcaaagtcctgtcttctttctacccgttgaccctcttctttttttttcctcccttgtctctgtgtgcatctgattccattttaaatctggtaaccaaaggcctggctagtgcttacacacagcccagctgcaaaaccattaatggacattaataatcctcagtacctttattcctggcattctacccccctcctccccagttcacactgcagatcatcaggtgtcacagagagaggacataccttgaaatgccctagatgatgtcatttactttgcaggacttccttgccttgcttctgattaatgtcaygactggtctgtctgagggtactgttatctacaaagagccaaatattagctcttagtagctattctttatccatgcctgattagggtcagtattatttttggctgtggttcagaaagaagagtcctgccaagcgttggcaaactctctatctgtcgagtttccaaagctttacacgttagagaaattgctgtgaatccagaatttgtttgttttcctccctccagcaaagtgaaatgttcatcccaagagtcctcaaaatctcagaggttacagggtatttttcttcctcagagagcttctgttttatcagcacctcccccacaccagggtcaaagctcaaaaaagttggagcagcccctgggaactgcagtggctgaggacattccagcccctgggctggcctttcttctgatctttggctgcagggcccactcttttggaacctcccacccctagaggtggttccagtgtggtggggaaaggtgtgcttctttactcatttttttaagagtcatagccagagtgcttcattctgcaaggacgtgcacatgcacatgcacacagagccttgagggcagggccaagagtgaatttggaattttccaacctgatacccattcccaaaagtaggagcttctctctagtcattttatcctctgagaaactgtcagttctcctcccacaaggctcccagacagccacgggtgaccagggtctccaatcactccttaagatgcctttgactggctgggcgcagtgactcatgactgtaatcctagcactttgggtggtcaasgtgggagggttgcttgcaacatggcaagaccccgtctctacaaaaaaagtaaaataataaaagtaaagatgcctctgaggggatctgtttggttcatattaaaagagactgaattcatccattcaacaatagcgagtttctcccaggtgtgaggtaccctgctagctaactggtgtgcacaaatcaagaaaacctcaatgcaccgtcactccataacttctcgcttttgtttcaggtgagggcttccacaactaccaccactcctttccctatgactaytctgccagtgagtaccgctggcacatcaacttcaccacattcttcattgattgcatggccgccctcggtctgrcctatgaccggaagaaagtctccaaggccgccatcttggccaggattaaaagaaccggagatggaaactacaagagtggctgagtttggggtccctcaggttcctttttcaaaaaccagccaggcagaggttttaatgtctgtttattaactactgaataatgctaccaggatgctaaagatgatgatgttaacccattccagtacagtattcttttaaaattcaaaagtattgaaagccaacaactctgcctttatgatgctaagctgatattatttcttctcttatcctctctctcttctaggcccattgtcctccttttcactttattgctatcgccctcctttcccttattgcctcccaggcaagcagctggtcagtctttgctcagtgtccagcttccaaagcctagacaacctttctgtagcctaaaacgaatggtctttgctccagataactctctttccttgagctgttgtgagctttgaagtaggtggcttgagctagagataaaacagaatcttctgggtagtcccctgttgattatcttcagcccaggcttttgctagatggaatggaaaagcaacttcatttgacacaaagcttctaaagcaggtaaattgtcgggggagagagttagcatgtatgaatgtaaggatgagggaagcgaagcaagaggaacctctcgccatgatcagacatacagctgcctacctaatgaggacttcaagccccaccacatagcatgcttcctttctctcctggctcggggtaaaaagtggctgcggtgtttggcaatgctaattcaatgccgcaacatatagttgaggccgaggataaagaaaagacattttaagtttgtagtaaaagtggtctctgctggggaagggttttcttttctttttttctttaataacaaggagatttcttagttcatatatcaagaagtcttgaagttgggtgtttccagarttggtaaaaacagcagctcatrgaattttgagtattccatgagctgctcattacagttctttcctctttctgctctgccatcttcaggatattggttcttcccctcatagtaataagatggctgtggcatttccaaacatccaaaaaaagggaaggatttaaggaggtgaagtcgggtcaaaaataaaatatatatacatatatacattgcttagaacgttaaactattagagtatttcccttccaaagagggatgtttggaaaaaactctgaaggagaggaggaattagttgggatgccaatttcctctccactgctggacatgagatggagaggctgagggacaggatctataggcagcttctaagagcgaacttcacataggaagggatctgagaacacgttgccaggggcttgagaaggttactgagtgagttattgggagtcttaataaaataaactagatattaggtccattcattaattagttccagtttctccttgaaatgagtaaaaactagaaggcttctctccacagtgttgtgccccttcactcatttttttttgaggagaagggggtctctgttaacatctagcctaaagtatasaactgcctggggggcagggttaggaatctcttcactaccctgattcttgattcctggytctaccctgtctgtcccttttctttgacyagatctttctcttccctgaacgttttyttctttccctggacaggcagcctcctttgkgtgtattcagaggcagtgatgacttgctgtccaggcagctccctcctgcasacagaatgctcagggtcactgaaccactgcttctcttttgaaagtagagctagctgccactttcacgtggcctccgcagtgtctccacctacacccctgtgctcccctgccacactgatggctcaagacaaggctggcaaaccctcccagaaacatctctggcccagaaagcctctctctccctccctctctcatgaggcacagccaagccaagcgctcaygttgagccagtgggccagccacagagcaaaagagggtttattttcagtcccctctctctgggtcagaaccagagggcatgctgaatgccccctgcttacttggtgagggtgccccgcctgagtcagtgctctcagctggcagtgcaatgcttgtagaagtaggaggaaacagttctcactgggaagaagcaagggcaagaacccaagtgcctcacctcgaaaggaggccctgttccctggagtcagggtgaactgcaaagctttggctgagacctgggatttgagataccacaaaccctgctgaacacagtgtctgttcagcaaactaaccagcattccctacagcctagggcagacaatagtatagaagtctggaaaaaaacaaaaacagaatttgagaaccttggaccactcctgtccctgtagctcagtcatcaaascagaagtctggctttgctctattaagattggaaatgtacactaccaaacactcagtccactgttgagccccagtgctggaagggaggaaggcctttcttctgtgttaattgcgtagaggctacaggggttagcctggactaaaggcatccttgtcttttgagctattcacctcagtagaaaaggatctaagggaagatcactgtagtttagttctgttgacctgtgcacctaccccttggaaatgtctgctggtatttctaattccacaggtcatcagatgcctgcttgataatatataaacaataaaaacaactttcacttcttcctattgtaatcgtgtgccatggatctgatctgtaccatgaccctacataaggctggatggcacctcaggctgagggccccaatgtatgtgtggctgtgggtgtgggtgggagtgtgtctgctgagtaaggaacaygattttcaagattctaaagctcaattcaagtgacacattaatgataaactcagatctgatcaagagtccggatttctaacagtccttgctttggggggtgtgctgacaacttagctcaggtgccttacatcttttytaatcacagtgttgcatatgagcctgccctcactccctctgcagaatccctttgcacctgagaccctactgaagtggctggtagaaaaaggggcctgagtggaggattatcagtatcacgatttgcaggattcccttctgggcttcattctggaaacttttgttagggctgcttttyttaagtgcccacatttgatggagggtggaaataatttgaatgtatttgatttataagttttttttttttttttgggttaaaagatggttgtagcatttaaaatggaaaattttctccttggtttgctagtatcttgggtgtattctctgtaagtgtagctcaaataggtcatcatgaaaggttaaaaaagcgaggtggccatgttatgcwggtggtyaaggccagggcctctccaaccactgtgccactgacttgctgtgtgaccctgggcaagtcacttaactataaggtgcctcagttttccttctgttaaaatggggataataatactgacctacctcaaagggcagttttgaggcatgactaatgctttttagaaagcattttggratccttcagcacaggaattctcaagacctgagtattttttataataggaatgtccaccatgaacttgatacgtccgtgtgycccagatgctgtcattagtctatatggttctccaagaaactgaatgaatccattggagaagcggtggataactagccagacaaaatttgagaatacataaacaacgcattgccmcggaaacatacagaggatgccttttctgtgattgggtgggattttttccctttttatgtgggatatagtagttacttgtgacaagaataattttggaataatttctattaatatcaactctgaagctaattgtactaatctgagattgtgtttgttcataataaaagtgaagtgaatctgattgcactgggtctgggagtttcttttggctgtgattcaaagtcttgggatttgtctctggctcatatctatgtctgtacctttaagagtataaaagaagtagaagttacaatggttgactcataccccattaacctgccctgctgtcctaaaggtaactttaggttaaactctgggacgcaggaagccaggagtctgctgccattaaatcaaacacattaacaccagctggcaacttggccctggggaagtgccagggttctcgggtgtgtcacgtggtcggtcacatagacctaagataaagacactgggagaggaaaagaccagcaggagaagcgctccctgggaaagcagttttttgctcttgcccaggctggagtgcaatggtgtgatctgggctcactgcaaattctgcctcttggattcaagcattctcctgactcagcctcccaagtagctgggattacaggcacatgtcaccatgtccggctaattatgtatttttagtagagatggggtttcaccatgttggtcaggctggtctcgaactcctgacctcagatgatccacctgcctcggcctcccaaagtgctgggattacaggtgtgagccactgcgcccagccaaaagcagttctttaccttgcaacccaggctgggcagtccagctttttcctgtttctgaaaagtagtcacctctagggaataaaatggcttcttgagaatgctgatatgcacagcagaaggaagaaaggaaaaccaatccaaggaacggcttgtatgttcctggagcagagggcttcatgctcacaggtgcacaaagtggaaacggttttggtttttggtttttccttttagcttttaatacttttaaaattatttttcttgaaaccgggtcttcctctgttgcccaggctggagtgcagtggtgtgattgcagctcactgtagcctcaaactcctgggcataagtgatccttctgcctcagcctccgagtagctgagactacaggcatgcatcatcacgcctggctaattttttttagttttatttttgaagaggccggtctcactatgttggtcagggtggtctcaaactcctgggctcaagcgatcctcccaaagtgctcggattacaggcatgagccaccacacccagcctagcttttactatattttatctgataatccttttatggaaaaaagaagggcagactcttttacagtttgaagaagctccatattccatcaggagccatcttgagcaatacctgggtttctaagagctccccagagccagttctccagctcaccttgctttctaatctaaggttgccctcaccttggacaagaagcacgagtccctcagagtaattcagagtatccaaactcaaaagtctatgtacatggaggccttgctagaccttaatggtgacattttcatcaatatccggttttctgccatgagtccctatccctctttttcttaacatattcaagccagaatattttttcagccattctgtaactgcacagtttcttccaagtctctactttgtctcccattaactaggatccaatatatttatgtatttatttattttaatttttgagacggagtccccctctgtcacccagcctggagtgcagtggtgcgatctcaccccactgcaacctctgcctcctgtgttcaagcgagtcttgtgcctcagcctcccgagtagctgagattacaggtgcccgccaccacacccagctaatttttgtatttttagtagagacggggttttgccaagttggccaggctggtctcgaactcctgacctcaggtgattcacccacctcggcctcccaaactgctgggattatagatgtgagccactgcacccagcctcaatttatacaatttatcctcactgttctctttgctgctttctgtttcgtttttgtcttttgtttcagacagtgtcctgttctgtcacccaggctggagtgcagtggtgcaatcatggctcactgcagcattgaactactgggatcaagcgatcctcctgcctcaacctcccaagtaactgggactacaggtgcacaccaccacatgtggcctttgctactttcttatttcctcttatttcacaattggctgagctccctctgattaaacacacctccatgcttcctccaggaatctgtattttgcatatctgttatttcatctggggctgttttcttattattagctgcaaaagttccaaagaggaagaagaaaaaagatatatcagagaggtggaaaagagttgatcaacatggtcaactgaattcaagacagagaaggaacatgtgatgagcttacctgaaagggtgatttgtagagtaagagctcttagggggacaaagtaatgaaccctgattttgatatgtttcatatgggaaggtataaggaagttaaggttctgtttaggaatcaagattaaccgtggggcaaaaggacaaaaaatagattaaggtaataatggagaacagcatagaaatgaaattcccaatgcccaaatggccaccagttttttcacgtttccctagaagaaccaagatagttcctaaagatgtctgccaggatagaaaaggaagaggcatctagattggaaaggaagaactatctctatttgcagatgacatgactttgtatacagaaaatcctagagaatacacacacatacacatattaaagctaataaatgagctcagcaaggttgcaggatataataatatcaatatgcaaaaaatcaagtgtatttctaaactggcaatcaataatttgaaaatgaaattaaagaattccacttataacaacaccagaaagaataaaacaaataggaatacgtttaacaaaaaaagtacataagtttgttacgttgaaaactacaaaatgctgttgaaagaaattaaagaaggcctgctaaataaataaaaagaaatcccatgttcatggattaaaagacaatattgttaaggaggtcatactccccaaattgatctacagattcaaggcaatccttattaaattccagctccttttttttttttagagaaattgacaagctgatgctaaaatccattctaattcaagggacccagaatagccaaaaacaaatgatgcaaaaaagcacaaagttgaaggacttacatttcctgatttcaaaattacttcaaagggtcagtaacgcagacagtgtggtactggcataaagacagacatatagatcaatgacatgaaagtatagaaataaacccatacatctatggccaattgatttttgacaaagatgcttagacaattctatgaagaaagaatagttttttcaacaaatgttgctgggacaattggatatccacatgcaaaagaatgttggtccactacctcacaccatgtataagtattaactcaaaatggatcaacaaaaactataaaactcttaggagaaaacataggtgtaaatcttcaccaccttggattagacaataatttcttagatacgatggcaaaggcacaaacaacaaaacttttaaaaataggccgggcatggtggctcacactgtaatcccagcactttgggaggcaaaggcaggtggatcacttaaggtcaggagttcgagaccagcctgaccaatgtggagaaatccgtctctactaaaaatacaaaattagcagggcatggtggtacatgcctgtaatcccagctgctcaggaggctgaggcaggagaattgcttgaacccgggaggcagaggttgcagtgaactgagatcacaccattgcactacagcctgggcaacaagagtgaaactctgtctaaaaaaataaaaaaataaaaaaaaataaattgaactttatcaaaattaaaaactttttttttttcttgagacagggtctcacccaggctggagtgcagtggcataattatagctcactgcagccctgatttcccaggctcaagtgatcctcctgcctcagcctcccaagtagttgatatatgaatggacatttttcaaaaaaatatacacaaatgaccagaagcacatgaaaaatgctcaacattattagtcatcaagaaactactttaggaccacaatgatctggtacagataggagctgaacatttaaaacatttttttttaaaaaacacaatgagatactacttcatacctactaggatgcctataatttttttttttttttaagagatagggtctcactatgttgcccaggctggtctttcctggctcaagcaattctcctgccttggcctcccaaagtgctgggattacaggtgtgagccaccacaccctagccctgtaatttttaaaaagttaataagtgttggtgaggctgtggtgaaatttggaccctcatgcattgctgatgggaatctaaaattgtgcatttgcgttggaaaacagtatagcagttcctcaaaaggttaaaaacacagttaccatatgacccagcaattctacttctaggtatataggcaagagaattgaaaacatatgtccacacaaaaacgtgcacatgaatgttcatagctgcattatataatagccaaaaagtggaaacaacacaaactcccatcaacagatgaataaacacaatgtgggatattcatataatggagtattatttagccataaaaaagaatgaagtactgatacatgatacaatagggatggaccttgaaaatgttattcaaagtcaaagaaggcaaagaagtcagacacaaaaaactatatatcgtatgatttcatttattatgaaatgtccagaatgggacatctagagacagaaagttgatctgtggttgctagagactgggggaagggttgccaatgtgcatgggttctgtggggagtgatgaaaatgttctttaggtagattttggtaagggttgcatgtctctgtgaatatactaaaaatgtctgcatcatacactaaaagagtaattttatggtatataaattatatcttgataaaaaattatattttaaaaaaccctcttaatgttttaccactagttgtagctgagacacaaacccaaatatattaagtactgatgaaaataaattttttgattaaaggaagtgctccatattctctctctctctctttttttttttttttgagatagagtctcactctgttgtccaggctggagtgcagtggcacgttctctgctcactgcaacctctgcctcccgggttcaagcgagtctcctgcctcagcctcccaagtagctgagattataggcatctgccactatgcctggctaatttttgtatttttagtagagatggggtttcaccatgttggccagggtggtctcgagctcctaacgtcaagtgatctgcccacttcggcctcccaaggtgctgggattacaggcatgagacaccacacccagtccatgttctcttaattatgcagtgatgtagtctctagtctcaaacttcaaagggacaaagactagccacatgagaaaaggcaagctgctataaactggagtataatatgacaatttggctgtaccaagttacttggaaaaatcgagataccatgttctacatttagttaaaggggtttaggcaactgcataaacacagacctaacttccttttgagtgggaaattaaagttctgagtccatcagacttgtggatacaatcataataacaataacaatatttactagagctgggcactgtactgaatgcttggcagtgtgttatcgcaccacatccgaagcaggtgttattgttacctggattttactgatgaggtaactgagttcacttggagaaaaagctgtgagaaaatgtgtaatgttgctatgatctggttccagacctatggtcttaactactggctctactgggtgtggagcagatgacaaactagatatgtcgtaatctgtcatatgtccaactgtatgcctggcaatattcagttatactcag

SEQ ID NO: 94279 - DNA, 60835 bp, Homo sapiens
gccacccaacaaagttccataaactaggtggcttagagcaacacaaatgtattgtctcagctctggaggccggaagtctgaaaatcaaggtgtcagcagggttgcgcttcatctgcaacctggaggggaaggctctttcactgcttcttcttgtctttaagtcgtttgctgacagtctttggcactccttggcttgcagatgcatcagtccatttctctgtcttcatgtggccattttctctgtgtgggtgtctgtgatggttaatattgtcaacttgattagattgaaagatgcaaagtatcgttcctgggtatgtctgtcagggtgttaccaaaggagattaacatttgagtcagtggactgggaaagggagaccctccttcaatctgggtgggcacaatctaatcacctgccagtggagccagaatgaaagcaggcagaggaacatggaaagactagactggcttagcctcccagactacatctttctcctgtgctggatgcttcctgccctagaacattggactccaagttcttcagctttgggactctgactggcttccttgctcctcagcttgcagatagcctacattgtgggaccttgtaatcatgtaagtcaatattccttaataaactcctatatcctattaggtctagttcctctagagaaccctgactaatacagtgtctgtgcatccaactttcctcttctcgtaaggacaccagtcatactaggtaggactcccctaataacctcattttaacttgattacctctgtaacaaccctatcttcacaaagtcacattctgaggaactaaaggttaggacttcaatgtatcttttttggggggacacaattccactcagggtagtccattcactaccctgactcttggtgagtctatcacccaggtggagggaaaaaatgtgggtgtgccatcctaaagctgtgggtaattggcatgagttagcacattttgcagaagaaaaataaaatactggtcaacaaaaggagtcaattaaaaaaacccactgcagattacagaggaagccaataggggtggagaggtaaatgatgaaacagatagttgaatcatttttctggtaaacattttaaatagcattttagatcactgcttcctttttcaaaaacaaggaagattttcctgggcagtcttttctgaggaaggaggagttcctccaaatcttttttttttttttttttttgagacaaagtttcactctttttgcccagactggagtgcaatggtgcgacctcagctcactgcaacctccacctcccagtttcaagcaattctcctgcctcagcctcccaagtcctgggattacaggcatgtgccaccatgttttcaaacctccctcacctgtacttataaataagttcacatttagatttattctccttttttttttctggataattatttctacctgtacttgcagaaccttactcagtggccccctcccctggtggtatctcagaggatttcataaataggctaatgcacgctgaatactgcactgtcctgcttctgcctgagatcctttcaaaactgcaacatcttggttgggtgtggtggctcacccctgtaacctcagcactttgggaggtcaaggcagaggacctcttgagtgcacgagtttcagactagcgcagggagtatagcaagggcttgtctctacaaaaaaatttaaaaattagctgggtgtggtggcacgcacctataatcctagctactcaggaggttccacgggaggcagaggctgcagtgagctgagatgagccactgcactccagcctgggtgacagggtgagacaccgtctcagaaaaaaaaaaaaaaaaaaaagttgaagggagctggcttgccccttgcaccatgtaggatgcatgagaaggcaccatctttgaagcagactgagccctcaccagacactgaatctcctagcaccttggtcttagacttcccggcccctagaactaagagccataaatttctgctgtttataaattacccagtccaaggtatttgttatagtagcctgaatggactatgacaatacatgatgtcattttttggactgtagtgttcatcagctctttggagatgaccatgccagacctctctccagcagttctccctgtgggtacatgtactgtgacttcttcctcacctctacatatctggcattcaccgccagcttcctgcccttccaggcagccttactggactggatccaagggcactgtctcctgcatggcccatatctgatccatgggaaacacaaatgcatcttgggacccctcggcatgtgtgggctgacagccgaccactgcatgcctttttcaggtgggaggtaagtgaccagagagtctccatgtgcaccaacatacctaacaagctccccaaatggctggaagcctgtaggcatgaagtgaaggaaatgggctgcggaagcttccctcagtggggaggaagtaaactcacagcacagcaaaagctctgtcagagatttcttttttctttttttcttttttttttttttgagacggagtctcgctctgttgcccaggctggagctcactgcaagctccgcctcccgggttcacgccattctcctgcctcagcctcccgagtagctgggactacaggcgccccccactacgtctgactaattttttgtatttttagtagagacggggtttctccgtgttagccaggatggtctcgatctcctgatctcgtgatctgcccgcctcggcctcccaaagtgctgggattacaagtgtgagccactgcgcctggccttttctttttctttgatacagagtctcactcgtcgcccaggctgcagtgcaatggcatgatcttggctcactgcaacctctgcctcccaggttcaagcaattctcctgcctcaacctcccgagtagctgggattatgggcacgtaccaccatgcctggctaaattttttttttttatttgtatttttagtagagacggggtttcaccacattggccaggctggtcctgaactcctgacctcaggtgatctgcccacctcggcctcccaaagtgctgggattacaggtgtgagccaccgcgcctgcccctttttttctttttttgagacggagtctcattctgtcgcccaggctggagtgaggtggggagatcccagctcactataacctctgcctctcagattcaagcgattctcctgcatcagcctcctgaataactggaactacaggtacgctccactgtgcctggctaatttttgtatttctaatggaaacggggtttcaccatgttgcccaggctgatctcaaattcctgacctcaagtgatctgcctgcctcggcctcccaaagtgctgggattacaggcattaagccaccgcacccggcctctgtcagagatttcttcaccaaaccctccttccactctccaattccttctttttatttatttattttattttattttttacttttattatttttttaattttttttttttttagatggagtctcactttgtcgcccaggctgtagtgcagtagtgctatcttggctcactgcaacctctgtctcccgggttcaagtgattctcatgcctcagcctccctcccagagtagctgggagtataggcatatgccaccatacctggctaatttttgtatttttagtagagacggggtcttaccatgttgcccaggctgcgacctgcctgcctgggcctcccaaagtgttgcgattacaggtggctcccgcctgattctttcttacatctttggagatctcttcctagaatttcacattagtatatcttgttgtcctaatcaaaatctatactttcatatcttgttacacataggagaaaaagagctaagagaatgacacagaaatggagctggagccttaatacacctcctaactgttaatctgtttgggtggggtttctgtcacttgtggcctacagcagtcttactgtccccccaacctcccacaaagttcttcaggttgaagagagtcactactttgtagaatgggaagctcttactcaaaaaagtagaaactgaatacaaaactagactttagaaggataagataaataaatcaatgcattcataacacatcattacaagaaagtgagggggttagaggtctcatctttaaattctgctctcaaggacatggagggcccctctcacaggctttcccaaagctcctctgggtgtactggtctgactcagcaagtgaacatctgtggttttgcctagccagcatcccttctcctagcagcagcactcagcatgtccttttggggaatcactcttttctcttgtggtttatttaaagtgactgcacaatcagaccccagagtttggcttatgtcctaggccttgccagtgaaaatatggtacctcatcagtggcagttatttttccgagaaaggacatatcatgacccaaggggcagcagcagggaggggtggatggaagagacagataacaaacaataagctaaataaacaaattcagtcaggagctaaagaaataagtcattcaggagtggggcaggtggcaatttcaaatggagtggttagggtagttctcaatgaggcagcatttgagaaaatatcaggaagagtgagaagtagtcgagcattccaaacagacaggagcctgtgcaaagaccctgcagcagagccctgtctgccttgcataagaaatagcagggaggccagagtgactggagcagagtgagccagtggggaggcagtagcagatgaggttgtaggggtaacagaggagcagatcaggcagggctttgggttttactctgagtttgggaaaccactgggaaggttttgggcagaggaggaatttgatctggctttctttttttaaggtcactctggctgctttatggggacaggctgcagggatatcagggaagagaccactgtcatgacccaggtagcagatgatggaggcagaggtaagaagtggtcaggctctgggtatgctagggagatccaaccaacagaatttttgggccctggaggtgggatgtgagagaaaggtttctgaaacagcaaggtttctggccttgacaactggaagatggagttgccatcgagatggtgatgctatggggaagagatcaggggcacagatttggatgtgttgagattgaaatgtattttagagatccaagaggaggtattaaggaggcagctggatagaggagtatggagttcaggaggcaggtcccgcctggagataaaaattcaaagccaagccttctctctctgcactcaacaaaacctcacttaaacaggcttgtcaggtcatggaatacggtactagaactctttgttggggaaaatgccagtcaaccttacccgtcagaacgctgcctttaagatcagagatctctttccttcagcctaatccacccctctccctgttttctcccctagccccactaggctagaagctccctggcttctcccacatcaggatccccaacaaacccattcccaggtggataagagcccaggcagttccctagaccacgttcactacttcctagctacccaagagcaggacatcgcagacaccggcctcctggaatattccctccgctcctcacatttacaggaaggactcaggtaagcctcggcgccagttcagtcggcccggggccactaaataccaatgggatccagtgggttctacgtggtgagtggggggcggataagagagatgcgacaccccccgggcctgccccccccacgccggggccaggcacaccgtgagggggccaggcacaccgtgagggggcccagccacttccatacgccctccggtcggccggcacccaccacccacccctcgccaccaagctgggtgcagagaacagggcaggcgcacggacggttcttacggccccaggcgccagacccagggcacagaggccaggatctcacgcgcgaccgcacgaggccgggaccctccctccccttccgtccactcccttccccaccgcctccggtcccctcccggtctccgccaccccgcttcggggcccccgccccccagccgggcagccaatcggagctgggatcccgccccggtccgcaaagcckgtggcgcccggaggctgcacggagagcggtgcccgcgtcaggtgaggcgcgcgcggggaacgggggtcgcgcgcaggggagcgggggtcgcgcgcggcttccatagagcrctagggcctgagctcgaagccccaggcccgcaggaggcccgggcccgcggccgccagagccgggacgcagcctgggcgccgcctgccccgccccgccccgcccgggcccggagtgaggacgcggtcggaggcccagcagcgcgggtcccggcaaggggctttctcaactacacaaaagacagtctaaaaaattaagtctccatttcggttaagactgcccgtagtttcggtttttatgtagacccaagagggcaggctcggcgtccgcgtgccgcgtagtccggcggctccaggagcgcgagcggctgggcccgggcgtagccaccgcagggccgctagctcggccgggacccgcctgggatgccctggggtctgctccgctggggcgaatcctgaggcgccacgcgaggcacttggcctctcctagccccgctttcgtttttggaaactggaaactatcacttatttcgtagacggtgtgagggttacatgacagtgttctgtaaagtgcactctacatatgaagtgctcagaaatatggctaataatgagggtatttataaactacttaaattataaaaagaatgagacatcagacttacagttttggatactaatttttttcacttaacgttcattatgtgataggagttttccatcctattataccgctgtgcgatctgatcttgggcacgttaaccaacctcttgttgcctcgattttctcacctgtaaaagtgggggtaatcataatgcttacttagtaggatagccctgaagaataagtgacttagcgaacataaatagcttacaatagggttttcagcatgggaaggattcagtaaatgttagctgtcatcatcaccacctacaaaggaagcaatactgtgctgaaagtttttccatcattaatgtaatttctatagtacgattcccaagaagatattaaaattatggaaataaaggtattggtatattcctaattatttcctaaaagattgtattgataaatatgctcatccttcccttaacgggatgcattccagaaaaacaagtcaaatgttagacaaagtatcagaagggaaattctgtagccagagagctaaaaattacaatagggtctctaattatacttcaacttttttaggaataattctcagtgtgttttcccacatttcatatgtaattttttttttttttttttttttgagacagagcctcgccctgtcaccaggctggagtacagtggcgcgatctcggctcactgcaacttccacctgctgggttcaagcaattcttctgacctcaggtgatccacccgcctcggcctcccaaagtgctgggattataacaggcgtggcatgagtcaccgcgcccggccgatctttacttttttattctttgtaccccctgcctatccagttagcatgtgattaaagtcaaagatttgccactttgggccacatctattaattttcatctttgttataattgtatttagtttttgatctacactgcttattactcccagtcattttttctagaactgaaaatctggtaaaatactcaaaattgcactgacttctatgtagaggcgacactccatcagaaccgtgggctgacagggaatcccactgtgcaggagctgcgcgcattttcatttctgattctctttggcgtatccaggactctgatgacatgatcatatatttatcagtagtaacaggttgggccatttgttttttgtggtaaatcatatatttaagattttagaaataagttgatagccatgtattttggaatttgaaaaagacattgcattactcagcttcaaattaagctttaatcaaatagtgaaactttccattaatggacagtgtatacctttttgtgtatttaaaaaaaaaaacactgaatatagtgcctttgtgacaggggagcttrgttcctgacaatgtcctcttgagtcttttttttttttttttgagatggagtctcactgtgtcrcccaggctggagtgcagtggcgccatcttggctcactgcaacctccgccccctgggttcaagtgattctcattcctcagcttcctaagtagctgggattacaggcacgcaccaccatgaccagctaatttttatacttttagtagagacagggttttgccatgttggctaggttggtctcgaactcctgacctcaagtaatccacccaccatggcctccccaaagtgctgggattacaggcgtgagccatttcacccggcctctcttccgtctttgagctgtgaggaaatagctacattacatgagctgctagatctgccttatggtcagaaatgaaggttgaactctcaggaacagtgacatatatacacactgatatttccaaagtacaatgccccaaattgatccacaaaggaattaaggtcatttgcaacaaaatcacagaatagtaacaaataaatagaagataaatatggccaggaattgagatgagagaaagtataagtacaagaaactattccaggggaaaaaaagaatgaagtgtttcagtgttatccaatagaattttctgtgattatgaaaatgtgctatatttaattaatttatattccaatagccactctgtgtagcggctcccttataggtcattgcaggcctatatttttgtagttgagtcccaaatttgtttctagaaaggtaaacttggtcagttacatggttcttgtcttttgaaagtaaaacatacatggcaacttcattcattcattcattcattgatcccccaaatgttaatggccttgaaggaagcagagcctttcctgattctcagttatagggaaaattttctgtggacttcattatcagagcaccttgatatgttattgccctgtgaaagtctgttcagtttggggctaggagggatgcagtcagtgaaagtggcatagtttgtaatgttttttagagttttgaataattatgttaactaatctttatagaaaagtttaaagtgtacagagaagcaaaaagaaagtagtcactaaaagtttcaccacttagagacataattactggtaatattttgatgtatatatttccagacttgtgtcccatgtagctattatatttttctcaatagatcccaaagtatccaactccctccagggcaagagttgcttttacctttacccttagacctctgaggctggcagctggccccacctgagagggtcaccctctccctaatccttccccatacttctgtgagtcacctggctttggggcaataatagatacttgagagggcgtttgaggaggaacaaggaggaaggtcacagctgtagttcattctgcatgatgtgtaatccaggctttttcaactctggcactgttgacattttgggctggataattctttgtgtatgtgtagttggggtaggaaggtgtcctgtgcatcacaggatgttttgcagcatccctggcctttccctactagatgccaatggcacatacccttttccccccgagtacaacaatcagaaatgttggtgagaaatactgggttaatgaaaatcactaatttattgctgacaaagctctggagtttcagattccaatttgcatgtgggaaagagactgaaatcaaaagggaaacataatgtaagccaaggaagctgtttagtcctggctgtgctattaatttactgtgagattttgcatctctcccacgtgcaaattggaatgtgaaactctagagctttgtcagcaataatttagtgatttccatgaacccagtagttcctttttttttttttttttttttttaagatggagtcttgctctgtcacccaggctggagtgcagtgggacggtctcggctcattgcaacctccgcctcccaggttcgagcaattctcctgcctcagcctcccgagtagctgggactacaggtgcacgccaccatacccaggtaatttttgtatttttagtagacatggggtttcaccatgttggccaggatggtctcgatctcttgacctcatgatcagccccatgcccgcctcggcctcccaaagtgctgggattacaggcatgagccaccgtgcccggcccttaacccagtagttgttactgacatttctgattgtcgtgctggggggaaaacggtatgtgccactggcatctagtggggaaaggccagggatgctgcaaactgatatactgccaagtttatcagttgggaatcccaacagtgaaaagcataaaaatgaaaggaattttaaggagactttttatagaagagtgggcaggattggaggagccaacaagtgatggtgaggcacacagggaagagcttcagtgggcaccatcccctctctggtttgaaggggtagggaggggaccagagctgggaggagggggctggaatactgctggaggagccactcccttccagacctgctgtggccatcacagaatgcagccactgccagagcagcagcctgaggaaccaggcagggggagcacaagtaccctagcctctctctttctgtttcttgcctgccgatctcctccactggctaaacccagctggatgctaagagtacagtcagcctgcctgctgaggagggaccaccagggaccaccatcagcaagggatccaatgtctttctgcctctgcagaatgaaggttggggcrcggggggcgctctacttcttagggatattgtgggaataaaaggaaataggcaaaaaatgtttttgaaaaacaaagcacatactgcgcacccgtgggccactactgcttttgacccctggctctgtttcatgaagtaatgtcgtgtcattctctttttaggtgctacaggatttctttaggtttgttttctgtccaccatatttcaactcatgtgtgctgtttgttgtgctaaaacaaatatttgctgatgcctgagtgaatagttgaatattttatataagtcaaatttatacgtaatgatttttcttgtaacttagccgtttctcttttacaaactcagaaaacctcagactttgaaaaggccttgaagttcctcacctgaaatctgagaacttggagcgccttaaaaaatctaaaggaaaacaaaacagtgaaagaacatgatatagtcagtgtagagaataaaattatttatgtaattaatattgaggatgcagataacacrttgtgaaatcttgcttgtaaaaaatctcgatctgctgaagaaagatgttctctctagagatctttgaaagcataattattgagcttttaaaatgttagaaacaaaagttagacccacacatattctggcgtgtggaagatttgcattccttcccctgcccgccccgcccccgcacttgtgagttgtgcctgtgtacgcagttcctgtagcactcggctgggcagaaatcatctttcagcactaagggaacatagttatgatctggaccttctgggagtggtcagtgcccaagaacaggtatgggactccagaaagttctgctctcaaccctattttgaaatagagttacacattgttctacaattatttgagttaataagcagctcttttcaaacgtgattatgcccttccaagtttaaatacactagactttagtgaaagtaattgacctcatctcatttctctcctgttatattaagatcactttcagtaaaaggtagaagcttttgaagtggtgaggaggaggtagaggagggacatagagcagataggggctggaaagtggggtggggaagagagtggcttctctttggcagagtaccaaggaaaagccctatctgtacagaacctttgtgcctgggaacttgatggctgcaacctgagcctcaacctagtttgcttgcggasscagaagagaagctaaaaaccttcagttaaccaagccagacaccaagaaagttaaaccgaaagagaaccccccaccccccgcaaaaaaaagaagtaaagtgggttaaagtgathtgttagcacagaaagagaacataagggtcatctaagttcatctgccccctcttctatttcaaggtgcagaaactaaggcacaagggaccccgtgtcctgctcttgatcacatagctagtgggtgccaagccaggtctagaactctgttctctggggtcacaggctggctcttcatccctctagagagatagctcatctgtgtgcacctgagcccgttgtgtttcggagtcaaagcaaataaaggctcaaactccaagactgttttgcagaccggctgcagtagatayggggggaggagaaacctgctttaaattgcttcaagcaagttgtttctgcaaaggtgttgacttttttctttcaactttctagtgagtcactgcagcctgagctgttatttgtcattatgcaataattcaggaactaactcaagattcttctttttaaattatttgtttatttagagacagagtcttgctctgttgcccaagctggagtgcagtggtgtgatctcggctcactgcaacctctgcctcctgggttcaagcaattctcatgtctcagcctcccgaatagctggtattacaggctcgtgccaccaccccctgctaatttttgtaattttagtagagacacggtttcaccatgttggccaggctcgtcttgaactcctggcctcaagtgatccgcccgcctcggcctcccaaagtgctaggattacagccgtgagcctccacacccggcctatttatttatttttaaattggctgctcttagaaaggcataccatgtttctggatgggaaggcttattaattcaccctaatttaatgtataaatttgatgcaatcatagtcacagtcccagtggaattttttaacttggtaagatgttctaaaattaatgagagaacttgaattaccaggtattgaaacactgtaaagccacaatcatgtaaacagtatgttataaccatgggaatagaggtctgtgatacagcagaaaaaagtgaaaaaaagaataactgtattcataaaaatttaaatgtggagtcactgggggaaaggattaaatattcgataatgtagaaacaactcaactatttggagaaatgtaaatttagagccttatctcatgccatataccaaaatactatttagatttgattaaaaaataaaaatgtaaataaagaaaagttaaggcaaggcgtggtagctcatgcctgtaatcccagcattttgggaggccgaggtgggtggatcacctgaggtgaggagttccagaccagcctggccaacatggcgaaaccccatttctactaaaaataattagcgtggtggtgtggtggtaggcgcctgtaatcccagctactcaggaggctgaggtgggagaatggcttgaacctgggaggcagaggttgcagtgagccgagatcccaccattgcactccagcctgagtgacaagagtgaaactctgtctcagggaaaaaaaaaaaaaaaaaagttaaaaatctaaaagaaaataaaaatgtatctatttaatataagtcttttgggaaaatatttctcagcataatactaaaagttagaaaatagaatgtttttgtgtttgaccatttaaatagtacacctttgaaatttaaataaaaaaaggaaaactaaacaaaccaaaacctttttgttacaggattaggtcttagatattttaagatatattaaaatacagaataaagttcctccttgattctgttcagagtttaactagtcctggccagacaatggggaggaaaggagagggagctgtgtgatgggcaggcagagagttggaaggtggagccagatctcgcttggcctgggattgctgcctctcctgacggtgcatcttatcgtaagggggagttgaaagcagaaggggaaacagcacagaaaggatctgtctggccgttacagttatgtgaccatggcaggtcctgccagtcactcacagctctgtgagcaactagctggggtaccccagctgaatgtgctttaaaaacagcaatgtggccaggtgcagtggcycatgcctgcagtctcagaactttrggaggccgaggcaggaggatcacttgaacccaggagttcgacgttgcagtgagctgtgatcatgcgtgccactgcattccagtctgtgttaaagaacaaaaccctgaccctgaaaaataaacaaataaacagcaatgccacttattctaggtggtacacccctgatgcccagtgtacgagttccatttaggcttctttctcgtgcatatgcatctctccacatcctttcgtttgtttgttttcttttgttttgctttccccagattatgtaggaaaacaataaagttcataagtaatgttctgtaggccacttttataggaaaactttcctctaagatctcattagaaaagaaaagcaagtagcctgccaccgagcacctgtgccagcacaactacactgtggagcacccagataaagtggcgctgaacgcactgcagcctcctaagttcggaaaagaaagctcattagcatctacactgaagacgctcctgttcttcacagctttaatgatcactgttcctatcgggttatttatatttcacaactaaatcttatatatctggaggcgcccttgggatatccaataaggacagctgtttttatgctgctattgttgccgtggtcaccggccatgtggtgctggccctctttatgtatgtggtctggaatgaaggctcatgacagtgacatgaaggcaaacaggattaaagtgaacatcaccttttgatagcattaaattcattttttaaaatgataaatgctggaggggggacatctgatttgaataaaattgaaagaacatgttaaagtcagtcttaaggagtcatgtttgagtagtgtaaattttgatcctcctaatatgttgtttgtatattcagttttaactatatgaatctcatttgcaaatgagaatttggaaaagttaaattagttacaaatagatatgttaattacaaaaaaaaaagaaagggagagcaagtagtagtgagatttctgcaaggtcaaaggactcagggcagtttcttctgaatgtagtttgggggctggagaaagaaataggaagcagtagaattgctaggtcagattggaattttaagagctattgctgcactaccctccacagagatgctacccacttgtagtcccccaataatatcagagtgtattcctgaccacactttaaccaacacactctggcaaacattttgatctgtcagtcagataggccttcttgctataatcagaatttacattctgtgatcatgactgagggtatcattctgcctgttataagagttacctgaatttccttttctgggaaccagagagcaatttagagctggagcagaccttggagatgaagtccaaccattcagcctacagcctatgacccgtttgaccgtcgttgttgcttgggtagttcaggactgacaggactggacaccaggtctcctgtttatccttgaagctctctgggtgaatgtaagacaggacctgtcaaggcctctggcacagcctgggtttgagtctagaaccagaaagtctggaaattgcagggcagtgccgcagtgccttggctgtgaagcagggtgctttaccctccctgaactccaggcacttygtctgtaaaatggaattaatactagcttttttttttgccagggttctgaggattagggttaatgtgtatgaactagctgacccagagaggctcacatctgttctcatcctcctcacatttgggtgttctgttatctgttatctgttctgtcactgttctgttatctgactatcactcacgtgcaagctccaagggagacttgaatgaaagttcttaaaaacagaagtaaagcacagtagggtgttggggagggcatctctgtggggcctccaggtagccaggggagggcgagcagagtgtgcttgctggggaccctctgctcccgtgtcttcatgcaccctcctacttagagtgctggcgctcccaccccacccaccacctgcgggtcagctctcagtgtcttagttatccttctgagattttttttttttttaaatgagacagggtctctcatctgggtacaaaatagtttggggaaaaaagagataaggtctctgtcaccctgtgagtgacagaggtgacgacatgtgagatagtgactcatgtcactatcactctaggctggagtgcagtggcgtgatcatagctcactgcagcctcaaattcctgggctcaagtaatcctcctgccccagcctcccaagtagctaggactataggtgtatgccacaatgcctggctaattttttaattttttaagtaaagacagggtcttgccatgttgcccaagctggtctcggactcctgggctcaagcaatcctcccacctcagcctcccacagtgctgggattacaggtgtgagctaccgtgcccggcctttctgagatattttatgcataaaaagacatcacacctatactgcctccccaggatctgagaagaaagtccactttctttgtcacattctgctttttggagtttttcttctagtaggttccctttttcagatttttttcagatgtgaaaaggctccagactgcaaaaggaaaggcatcatgtgtgctggccaggttgggtcatgagacccactctcaaagcaggaaggagcaatgggaagagagaagggaggggagttgccgaaagcaggctattttctttttttttttttctttgagacagagtctcactctgtcgcccagtctgggagtgcagtggctcgatcttggctcactgcagcctcctcctcccaggttcaagcaattcttctgcctcagcctcccgagtaggtgggaattacaggcatgcgccaccacacccggctaatttttgtatttttagtagagacggggtttcgccatgttagccaggctggcctggaactcctgacctcaggtgatctgccttccttgtcctcccaaagtactgggattacaggcgtgagccactgcgcccagctccaaaagcaggctattttcaacacaaagcctacacgatcacccatgcccccttccccrggtagtcttaaggttgccaaggtcggttttgtttgttttggaatgggggtggttatttcactgtcattcatggttctcatccctgtgcttaaccaaagagaatgagatcaaatgctgtgctgggtccaagggcaggggttgccacagccttcccttttcagaggccytctgccctctgcaagctaggagtggtcatcgkcatcggcttcctggacagcctatgcaggtggaggggctggagaggcatctgtagtgcatttttcatcacctctggttatccatttgcctgacctttcctgcccagttttagttaaaatacagtggtgattctagtggctctaacaagtgagagaaaaaattaatctttacaggcctctgttctactgtcattccagtgtttgtccaggtgtggctcctgaccgtctgtgtgcctttacctggatgcttggtgaaaatgcagattcatggcctcccctccactcttggccttccaaatcagaatctgggagtgaaacccagaaatatgcattttcaacaagaatcctaggggtacattaaagttgaggacccctgttaagccgtgttgttgctttcttttccttcactctctggtctcccctcatctcctcttgtcacccctccttccttgctacccctgctcacctgtttgccccctccttcgtcttaatgctgagggtccggagyggcttcttggactattctttgaacatactaaattgcagtcctccagaaactcagctaggaagaaaaaaaagtacatatttcttattgccttgcttgtccccatttaaaaagccagataaaaaactgtcctcttcaagcaccagttttgggaagtgcatccttcccatggaggcatcccgattgcagctgctcttccaatgtaggagacggatctgggcttggaaatgcccttctctaaggaagcattgctggtgtgacatcccagggaagtcagctaccaccagccccaaagtagacactggcctgggtatcctagctggaaggcacaggtggtgaaggcatttgggaaacatgagaatgatgggacaggaagcagtgggggagcatggggtggcaaaggggaatgtttgcctggagtttgggcrggtgccaccagggacctgaacctctgcttttgtctttacagtgaccgaaggaagagaccaagatgaatrcagaggtgagttctttacaaagaccagtttaagggatgcttttcttattgtgtccytcatttctcctttgcagagtctccattccctttcagaaacatcagcacaaacttgagaacatttcccctctagcctactgaagtgcacgtggttctgggtgatgcaggaagaactaggcccctctgagttcttatctgtgtctgtctggcttcattcgaacttacccactgcagctaatcctgaaacaacactccctagctctggctagtagtggggcatggaggttgctgggcccagatccctgctttgtgttattctggaaacactttctctgcattgtctccttggtgctctcacttccagttctttgatgcatggagatgtctagctccttatccttttgttttttccttttgttttacccatcagccccttcctctgttcactcccttccaagtggagcctagaccttggggttcatcacttcagccactgctgtgctgacgcccactatgcttttcccacttgtcctgtccatccacatggcaaacacagaggccatccccacaagaggggggtcttgggtgagtggcacagccttgtgctgtttgcagctggcagatgtctcaacacccttatctggtgctcagcaccacccgccaggccccctgtcactctaggcagctccttgccagtgccctgaacccccagctccaggcttcatccctctccctaagctctgtcctcctcgaaggtccccctcactcttagcatcaggatcccttttcattttacagaggaaaatgtaaacattccatctgacatcatctccctcaattcctgcctctccatttgtcctgttcctcctgtcacagtgcaagggatgtttgtcagtgagaaagttccaggttgtgaacaccagaaagcctgacttaatgtggctttttcctggaagtccaggtgaagggcaggcttcagggctggtcgatcctgcggctcagtgactgcctcaaggatccaggagcttttcatctctctgctctccatccagctgttggttgcatcctagggcaggtgcccatgtggcagcaagatggctgcagtggcagttggggccacatatgttcgcattccctttcatcagcaggaagaagtggcttcctgcaactccttcaggggagtgggagcctttatttgaagccccatcaaatgtctccttcggtcttattggccagaatcaggtcctggaccatagtgtgtctgaggagcagggattttgtgattggcttcaactactcaggcccatcctggagcagcttcccccctgccccagggctgggtgtggaaagaagaaagggggatgtatccctgtctggtatgagacattcctggtccattttcatgctgctataaagaactgcccaagactgggtaatttaaaaaggaaagaggtttaattgactcacagttcagcatggctggggaggcctcaggaaacaacaattatggtggaaggcaaagggaaagcaaggcaccttcttcacaaggtggcaagaaggcraagtgctgagcgaagggggaagacccccttataaaaccatcagatctcgtgagaactcactatcatgagaacggcatgggggaaaccacccccgtgattcagttacctccacctggctcctcccttgacacacagggattatggggattacaattcaagatgagatttgggtggggacacaaagtataaccatatcacctagtgacggtatacccttctcctctgaaactgcacactcctgcctgctcagaccttgcaccacctccttagttatctcctttgccatgtgcatcattaacctaattcccactacctctttctcatcgatatttcaaaatgctttcttcagaacaaaatgacacctcacatcttgtccagcaactgttatcctatctttctttttttaatttaattttattttattattattatactttaagttttagggtacatgtgcataatgtgcaggttagttacatatgtatacatgtgccatgttggtgtactgcactcattaacttgtcatttaacattaggtatatctcctaatgctatccctcccctctccccccaccccacaacagtccccggagttcgatgttccccttcctgtgtccatgtgttctcattgttcaattcccacctatcagtgagaacatgcggtgtttggttttttgtccttgcgatagcttgctgagaatgatgatttccagtttcatccatgtccctacaaaggacatgaactcatcattttttatggctgcatagtattccatggtgtatatgtgccacattttcttaatccagtctatcattgatggacatttgggttggttccaartctttgcttttgtgaatagtgccgcaataaacatacgtgtgcatgtgtctttatagcagcatgatttatagtcctttgggtatatacccagtaatgggatggctgggtcaaatggtatttccagttctagatccctgaggaatcgccacactgacttccacaagggttgaactagtttacagtcacaccaacagtgtaaaagtgttcttgtttctccacatcctctccagcacctgttgtttcctgactttttaatgatcaccattctaactggtgtgagatggcatcttattgtggttttgatttgcatttctctgatggccagtgatgatgagcactttttcatgtgttttttggctacataaatgtcttcttttgagaagtgtctattcatatccttygcccactttttgatggggttgtttgtttttttcttgtaaatttgtttgagttcattgtagattctggatattagccctttgtcagatgagtaggttgggaaaattttctcccattttgtaggttgcctgttcactctgatggtagtttcttttgctgtgcagaagctctttagtttaattagatcccatttgtccattttggcttttgttgccattgcttttggtgttttagacatgaagtccttgcccatgcctatgtcctgaatggtattgcctaggttttcttctagggttttatggttttaggtctaacatgtaagtctttaatccatcttgaattaatttttgtataaggtgtaaggaagggatccagtttcagctttctacatatggctagccagttttcccagcaccatttattaaatagggaatcctttccccattgcttgtttttgtcgggtttgtcaaagatcagatagttgtagatatgcggcattatttctgagggctctgttctgttccattgatctatatctctgttttggtaccagtaccatgctgttttggttaccgtagccttgtagtatagttagaagtcaggtagtgtgatgcctccggctttgttcttttggcttaggattgacttggcaatgcgggctcttttttggttccatatgaactttaaagtagttttttccaattctgtgaagaamgtcatttgtagcttgatggggatggcattgaatatataaattaccttgggcagtatggccattttcacgatattgattcttccaacccatgagcatggaatgttcttccayttgtttgtatcctcttttatttcattgagcagtggtttgtagttctctttgaagaggtccttcacgtcccttgtaagttggattcctacccattttattctctttgaagcaattgtgaatgggagttcactcatgatttgactctctgtttgtctgttattggtgtataacaatgcttgtgatttttgtacattgattttgtaccctgagactttgctgaagttgcttatcagcttaaggagattttgggctgagacratggggttttctagatatacaatcatgtcatctgcaaacagggacaatttgacttcctcttttcctaattgaataccctttatttccttctcctgcctgattgccctggccagaacttccaacactatgttgaataggagtggtgagagagggcatccctgtcttgtgccagttttcaaagggaatgcttccagtttttgcccattcgttatgatattggctgtgggtttgtcatagatagctcttattattttgagatatgtcccatcaatacctaatttattgagagtttttagcatgaagcattgttgaattttgtcaagggccttttctgcatctattgagataatcatgtggtttttgtctttggttctgtttatatgctggattaccgttattgatttgcatatgttgaaccagccttgcattccagggatgaagcccacttgatcatggtsgataagctttttgatgtgctgctggatttggtttgccagtattttattgaggatttttgcatcaatgttcatcaaggatattggtctaaaattctcttttttggttgtgtctctgccaggctttggtatcaggatgacgctggcctcataaaatgagttagggaggattccctctttttctgttgattgtaatagtttcagaaggaatggtaccagctcctccttgtacctctggtagaatttggctgtgaatccatctcgtcctggactctttttggttgataagctattgattattgccacaatttcagagcctgttattggtctattcagagattcaacttcttcctggtttagtcttgggagggtgtatgtgttgaggaatttatccatttcttctagattttctagtttatttgcgtagaggtgtttgtagtattctctgatggtagtttgtatttctgtgggattggtagtgatatcccctttatcattttttattgcgtctatttgattcttctctcttttcttatttattagtcttgctagcggtctatcaattttgttgatcttttcaaaaaaccagctcctggattcattaatttttttgaagggttttttgtgtctctgtttccttcaattctgctctgattttagttatttcttgccttctgctagcttttgaatgtgtttgctcttgcttttctagttcttttaattgtgatgttagggtgtcaattttagatctttcctgctttctcttgtgggcatttagtgctataaatttccctctacacactgctttgaatgtgtcccagagattctggtatgttgtgtctttattctcattggtttcaaagaacatctttatttctgccttcatttcattatgtacccagtagtcattcaggagctggttgttcagtttccatgtagttgagcagttttgagtgagtttcttaatcctgagttctagtttgattgcactgtggtctgagagacagtttgttataatttctgttcttttacatcttctgaggagtgctttacttccaactgtgtggtcagttttggaataggtctggtgtggtgccgaaaaaaatgtatattctgwtgatttggggtggagagttctgtagatgtctattaggtctgcttggtgcagagctgagttcaattcctgggtatccttgttaactttctgtctcgttgatttgtctaatgttgacagtggggtgttaaagtctcccattattattgtgtgggagtctaagtctctttgtaggtcactcaggacttgctttatgaatctgggtgctcctgtattgggtgcatatatatttaggatagttagctcttcttgttgaattgatccctttatcattatgtaatggccttctttgtctcttttgatctttgttggtttaaattctgttttatcagagactaggattgcaacccctaccrttttttgttttccatttgcttggtagatcttcctccatccctttattttgagcctatgtgtgtctctgcacgtgagatgggtttcctgaatacagcacactgatgggtcttgactctttatccaatttgccagtctgtgtcttttaattggagcatttagcccatttacatttaaagttaatattgttatgtgtgaatttgatcctgtcattatgatgttagctggttattttgctcgttagttgatgcagtttcttcctagccttgatggtctttacaatttggcatgtttttgcagtggctggtaccggttgttcctttccatgtttagtgcttccttcaggagctcttttagggcaggcctggtggtgacaaaatctctcagcatttgcttgtctgtaaagtattttatttctccttcacttatgaagcttagtttggctggatatgaaattctgggttgaaaattcttttctttaagaatgttgaatattggcccccactctcttctggcttgtagagtttctgccgagagatccgctgttagtctgatgggcttccctttgtggataacccgacctttctctctggctgcccttaacattttttccttcatttcaactttggtgaatctgacaattatatgtcttggagttgcttttctcgaggagtatctttgtggtgttctctgtatttcctgaatctgaatgttggcctgccttgctagattggggaagttctcctggataatatcctgcagagtgttttctaacttsgttccattctccccgtcactttcaggtacaccaatcagacgtagatttggtcttttcacatagtcccatatttcttggagactttgttcatttctttttattcttctttctctaaacttcccttctcgcttcatttcattcatttcatcttccgtcactgataccctttcttccagttgatcgcattggctcctgaggcttctgcattcttcacgtagttctcgagccttggctttcagctccatcagctcctttaagcatttctctgtattggttattctagttatacattcatctaattttttttcaaagtttttaacttctttgccattggtttgaatttcctcctgtagctcagagtagtttgatcatctgaagccttcttctctcaactcatcaaagccattctccgtccagctttgttccgttgctggtgaggaactgcattcctttggaggaggagaggcgctctgctttttagagtttccagtttttctgctctgttttttccccatctttgtggttttatctacctttggtctttgatgatggtgatgtacagatgggtttttggtgtggatgtcctttctgtttgttagttttccttctaacagacaggaccctcagttgcaggtctgttggagtttgctagaggtccactccagaccgtttgcctgggtatcagcagcggtggctgcagtacagcggtggctgtagaacagcggattttcrtgaaccgcaaatgctgctgcctgatcggtcctctggaagttttgtctcagaggagtacctggctgtgtgaggtgtcagtctgcccctacttgggggtgcctcccagttaggctgctcgggggtcagggacccacttgaggaggcagtctgcctgttctcagatctccagctgcgtgctgggagaaccactactctcttcaaagctgtcagacaggaacgtttaagtctgcagaggttactgctgtctttttgtttgtctgtgccctgcccccagaggtggagcctacagaggcaggcaggcctccttgagctgtggtgggccccacccagttcgagcttcccggctgctttgtttacctaagcaagcctgggcaatggcaggcgcccctcccccagccttgctgccaccttgcagtttgatctcagactgctgtgctagcaatcagcgagactccgtgggcataggacccgccgagccatgtgcagaatataatctcctgttgtgctgttttttaagcctgttggaaaagcgcagtattagggtgggagtgacccaattttccaggtgctgtctgtcacccctttctttgactaggaaagggaactccctgaccccttgcgcttcccgagtgaggcactgcctcgccctgcttcggcttgcacacggtgcactgcacccactgtctggcactccctagtgaggtgaacccggtacctcagatggaaatgcagaaatcacccgtcttctgcgttgctcacgctgggagctgtagaccggagctgttcctattcggccatcttggctccactatcctatctttctcatcccctgcaaggcaggcttctcaaaaaagatacctgcagttaatttctccgttttctcttccctgggtcattctcagcctgttgcagtctggtttcttttcccatattatataccgaaatgagtcttgtcagggtcaatgatgatctctgtaaattttataaaaatttattttgtaataatgtagacacatgttcatagtgtaaaactcaggctacagaatggaaaacagccaaaagtaagtctccctattacgttatcttgaccagccctgccccacttggggctgacttctggtaaccactttcttgtgcctctgacctccttatctgaaggcccctgtggctcaccctgtggcttgctctaattcttaggatcttttaagttctaaagaaacaatagaagctttgcattaatattaagcttatacaccctggtccaggagcagttccatcagtcatcagtgatctcttctgtcctttttgatggcttttcctcttaaccttgtaagaacatgctagacttgggtcctcctctgctgttccttacatatatatattttatattttttttctttttctttttttttgagatagagcctcattctgtcacccagctggagtacagtggcgtgatcttggctcactgcaacctctgcctcccgggttcatgcgattctcccacctcagcctaccaagtagctgggattacaggagcaccaccacacctgggtaatttttgtgtttttagtagagatggggtttcactatgttggccaggctgggcttgaacccctgacctcgagtgatcctcccacctcggcctcccaaagtgctgggtttacaggcatgagccaccatgcctgtcactcatctcagtcacagctgccacagggaccccaagcccgttataacccaggctgtactttctgctttcacctgccccaaatctgctcctcctcgaagggccatctgtgggccaggcgctccagtcccctcactctgttcccacaagccagcagccagtgaccaaggctgtaaatcctgtcattgcctkgatgtagtcaccaatatttatgtgacaccatactgtaccagactctagacctggcttgatggctctaatggtaaaaatgtaagtgtggtactcatgctcatggaacttatcgctaagtgggaccaccatatctttccagtctgtcccttccttatcctacttcctgcctcctcatcacttcctcacttacctaattcttttcttcttctcctttgctttcctcaccctcctctaggccattccctytyccttttggaaggcagggggaagagacctcaggcacagggacggtccacacacccagttcctgacacattgcctctgttgtgctgtgcaaggccccgctctcagacttatttatattttattcattttctctccatccccattctcaccctgccaaagccaactattctaatgaattaagtggttttccttttttatttgtgtatgttcatgaaacattttgtttttgtgcaaataccttctaaatttatatacagtaggctgggcgccgtggcgcatgcctgtaatcccaaaactttgggaggccgaggtgggcggatcaactgaggtcaggagtttgataccagcctggccaacatggcgaaaccccatctctactaaaaatacaaaaattaggcgtagtggcacatgcctgtaatcccagctactcaggaggctgaggcaggagaatcacttgaacccaggaggcagaggttgcagtgagccaagattgtgccattgcactccagcctgggctacagagcaagactctgcctcaaaaaaaaaaaaaaaattatatgcagtaaaactgcctctttttttttggtgtagaggtttacccattaaaacacatatgtgtaaccatcaccccaggatgtcaggatgcagaacctcaccccaaaacattcttttctgttgcccctttatagtcacaacctccccttgctactgacccctggcaacatatatcacctcctgtgtgatatactttttttttcctgaaacagtctcacccttgtcacccaggctggagtgcagtggtgtgatctcagctcactgcaacctcggcctcccgtttcaagcaattcttcagctgcagcctcccatgtagcggggattataggagtgggccaccacacccagctaattttagtagagactgagttttgccatgttggccaggctggtcttgaactcctgacctcaagtgacccaaatgcctctcgacctcccaaagtgctgggattacaggcatgagccacagtgcccagcctgatatacttttaatgtacataattgtattttatatcatttatatctcattctccatttttctgtatgttaaagatatatagttaatctgctacacagcagcccagaatgtgcatccatttagtcctaacaaaaggcctaggagcaagatgctattattacccattttgtagatgaggaaaatgagcaataagtcaattgctgtaagtcacagggrgttaaggagcatcacagagatctaagccctgatgtttttgacccatgaatgcctttgttcttgcctatatccagctaatcccatccatccagttcaaatgtcctttgtactgcacaaacagttttctcaagagtcctctctcgggaagtcatacctccctcttatgaatttccattgtgctttatgtatcttttctttcgttaccttcccctcctgctttgactgtagctgtcggggtgcctcgctcatcttagcatccccatggcatctgacttgatgcctcatgcatagcttatcttcactaattatcagttgactaaatgataggatgattcagagactgttaagtaatcttctaatgcaatccagagcttgggagggtcagtgaaagtgtagagraaggaaatcatatgacagaaattttcaagcaaaactagttgtggcccagaggctggctggagggagaaagacagaagaaggaccatcggccacagtcgggctttgatcccaggatgtttgttgaatgcaggaatgactccaagcatttaaagctgggggctgccaggattcctagagctactggcttttgcccagaagttcagagtacaacctgtcaggaagggtggataattggagtttagcacacagcgtgaagatccagggcgcggtgggaaagccaggttgaaatgccttgggaatgcggcttggaagagaggatggcccacagctcaggatgctagggtctttggcatagaggtggtcatggaaaccctgagaatgagggacccccatattctggggacatgggagagagagaaaaatagagggatgaagactgagctttgggaaatatgcacatcttgggtaaaatgaagaaagaaagtgaaatgtgaaaagaaaacctcggtagcatgaggtaagagaagaaaggaaggagtgagtttgaagaaggtccaggtaagggtcactcatgtctgaagtccaggaggatgtggctgagaagaagcccttgaatgtgatgagaaggtcttggatgacccacggtgaagcagggaggtatgggagtgaaaaccaattgcagcagggccaggaggggtgagaggagtctggggcacttggggtcattggacagggcaggggcaggggcagcagaggactctgagcactgtagagggagctccaggaagggaagcgggagtgagccaaggcgctatacactgcagaattctcaccttcctagagcagccctctgatatttatgtctgttttcagtggtggtttatattttagatagtgaatacatttgtgtgattctaaactttaaagaggaaaaaaagaaaaaaaaatattttctatgagaagccttcttccctcctatccctgtttcccagccactctgtttttcttgctcccagcaagagcatgtcgccagtttcagtgttacaggtttctgggctgtcctttcaaagagattctaaacatagacagtatctttttcctttggctaccacccctcctgttactacacagactgtagcacacagtgcacactaggctgtcgtttgcttctttcacccgatcatctatcttggagaccagtccctttcaatayataaagggcttcctcgttcttttatttttatattgccatgtaatactctatatcacgagyctatcataactttcatagccagcctgttattaatgacatatagattatttccatcttttgcttgttataagcaaggctgcagtaagcctaagtcacttgacttgtgtagctctataggacacattatcttacagttggatttaccagaacaaagggcatttgcattttaatttgtaataaatatttccaagttgctctccataaagcaggttcttctctccctcctgcaacatatgaacatacctgtttccccaggccaaccaatgtgttatcaaacttttttttaattcttgcaaatagtggatgaaaacgactagtttgttctgtccaactgcctggactctccttccaccttttcagcacctgccctcatgcctcaccttgaagtttttctacagtgattttacattttcttctaccctctttatctcaaaaaaawttttttttctaagttggcagagcacattcctaaytatgaactccatttttgcatctggagtgccaaacaccagcttctctgagtccaagggtgggggcgcaagctcactctgtgactgtgatttggacctaagtgagttttttagtcactttgctgtgcttatgtgtccttttctgctgtctcaaaactgctcctgttctttgttccttaaataccacctctatagggctatttgtagtggcattttcccaaaggttcaggatagcagagcacagcagacaactgaaaatggaactgtggatgtcctggtttctggaagtccattgctccctcctccactgggcgtttctcactggcttccttctctgcagattttagccttttgctaacctgcgtgcactttcccctttcctctgcctcctactggttcctagccccaaagttttagctgctactacagagtggtctagccatctctgatttgcagtttcccttcagaacgcaccttcaagatccctcatgtaaaatgaagaggctcacgttaaaaggcctaacaagtaatttttctcaaaaataaagttcttcccctaagagcagcttgactattaagataccagtgtcttcactcatatcttttttttttttttttttttttgagatggagtgttgctctgtcgcccaggctgaagtgcagtggtgcaatcttggctcaccgcaacccctgcctccccggttcaagcgattctcctgcctcaggctaccaagtagctggggttacaggcacccgccaccaccatacctggctaattttttgtatttttagtagaggcagggtttcactatgttggtcgggcaagtctggaaactcctgacctcaagtgatccgcccacctcagcctcccagagtgctgggtttacagacatgagctactgcactgggcctttcacccatatcttgtccctgtgtgtcagttttgcaaggcagtaatatcgaaaccaaatcctaaagcagtttataatttagcctgacacactgtgcaagccaggttttgtatgcaagtttgtgtgtatcattaactaatgaaatmttaaaaagcagtttggcttatttatagataatggagctgtttcttaaccttgtgccttttttttaagctggtagaagcatatcctggttattatctggaatgtagtaatacggtaaccttaagaatgccataaatatttaacctaataaggggattgctagtcttcttttcttgattgaaagggaaacaaatattaatatttgatcattaatatgtgttttggctgtacagatttctccagaggctgtcttactgctttttggtaattagaaattaccaaaaaaaaaaaaaaagaaaagaaaacaagactagtaacccaaaaaggacttacttggtgaaattgtcaattgtcagttgggcactgtggccactccttcctatactcttccctgacttccagaagagaagccaggaactaggtctcccagagtccccttttatatgtgaagtccactcccaggactcccaggaaacttgcaaggctgaagaaagagaggcagttagtcataggagacagttcagtcagatgtgtgagccaaggccagtgtatggtttagcagcagtggacagtcaggctctgtgaatcactcttcccaagctgcaggctgacagaggctgagatcctttccagacgtcttggcttctgggcaagttctggagaatctctcgcttcaatattgaattgtataacaacagtacaaggtctaggagaaaagaaatggaagtgtactgttgtcaggttctttatagtatatgtggaatagtgcataatattactttaaagtagactgtggtaagtaaaatatataatataaaatccttaacttctgaaaaagagttatagctaatagccaacaaatgggataaaatggaatcataataaatattctaattaatccaaaataaggcaggaaaagaggggaaaaagaacagattgaacaaatagcaggatttctatagaatttgaatggaaacccaaccatatcaataatcacaatgtaaattgtctaaacgtttcaactaaaaggcagagattgttagactgagtaaaaaaaagcaagacctaactatatgctgcctataagaaactaactatagctatgaaaacacatatagattaaatgtgaaaggttggggaaaaaatgtattatgcaacactgatcaacagaaattgggaatggattgttaatatcagacaaaataaattatagggcaaaaaatattaccaggaataaaaatggtcattttagaaagataaaggggtcaattaaaaaaaaggacataaccatcctaaacttgtatgtatctaataacagagttttgaaatatgtgggtcaaaactgatagaactgaaaggagaaatacacagttatatacaattatattcagagatttctctaccctcaataattgctagagcaaggagacagaaaatcaggaaggatacgaagacctgaacaacacaatcaaccaacttgatctaacagacttatagaacactccacccaacaatagcagaatacacattcttttcaagtgtgcccagaacattaaccaaggtagaccacatcccgtatcataaaatatctcaataaatctaaaaggattcaaatcatttaaagaatgttctctgaccacagtgggattaaatgagaaatcaataatagaaaaacatttggcaaatccccaaacatttggaagaaatcctggaaggagaagacaagagcagtgggcacaggaagaggggcagagtcagtgggaagtggtgacaactgggtacagaggtgaagaaaaggggcaaatctgagatgacattcatgtttctatgctcagaggcatccaagaagtgagtttaagggatgcatggagataatttttttttttttgagatagagtctcactctgtcacccaggctggagtgcagtggcgctatcttgggtcactgcaatctccgcctcccaggttcaagcaattctcctgcctcggcctcctaagtagctgggattacaggcgcctgccaacaggcccagctaatttttgtatttttagtagagacgaggtttctccatgttggccaggctggtctggaactcctgacctcaagtgatccacctgcctcggcctcccaaagtgctgggattacaggcgtgagccaccgtgcccagtgcatggagataaattttatcagtttttattatactgagttgctgtataacttaaaagtcagtttgatttttcactgtaatactgttcacatacagcctccagcagtgcacttaaataatatttaagatactgcagtatcttaaatgtggaactcagaaggctgtagtgaagagtcaaagcctctggatcccacgctgagtaaggtgaccaatcatggtttgcccatttgcctcctctgccagcatctgatgaagaagctgtgccctctgaatgactcccagtagtatcagattcrtgtgtccactggaggagggacccagggagggcagaagtaccaggccatgggctgggtctgggttaatggggaaagctccctcattattggagatggggcagtagaagtggagagccaaattgggggaacactttctgtgggtactcggaaggttttcaacctaaagacatggtggagcaccttcaagaacaggttttggcgggactgacttctctccaagcccccatttcggggactgtctcatcccatcctgatgcygtggcttcctgtgtgttttgggctggcttccatcttgctcrtcgggaccctgccagctcctttgttttgtagttttctgctcgatgcctacagtgttttcagactccaccttggtcccttgtgtttcagcccgagaggaagtttggcgtggtggtggttggtgttggccgagccggctccgtgcggatgagggacttgcggaatccacacccttcctcagcrttcctgaacctgattggcttcgtgtcgaggtggctcacaatgtctttgtgcttcataattcatggaaagcccagtgaggcggattagctgcaggacatggagattttccagacccagggcagggagagccatctcccaactgagaactgtgcttagggtcagccccataagatmtyaggttgggatgggtctgggaactgaagcttgctgggcctgcagctgggatgcacagtaggttggcctgggagactggaagacagaggcaggagggtgagctcaaggctgacagttagagaaggggcacagaaaacacatgcatggggctttggcctgaaaggctttcggtgtgcaccggggaatcctgacatagtcatcatgacagccatcctaggtggtcctgggctctacatgtgatatttccttctgcgtagtgttattaaccccccagtttacagataaggaggctgaaccacagaaaggttaagtaatctgcctgaggtcacacagctggaaagtctaagaactgaagttgagcagaagtctgtttccaaagcccatcttttaaacaccatgtgttcttttgccattggtaattttgagcctcacttttattattattattattttttttgagacagagtctcactctgtcacccaagctgcagcgcaatggtgcaatcacagcgcactgcagccttgaccgtctgggctcaagtgatcctcccgcctcacagctcaagtggtcctcctgcctcagccttctgagtagctgggactacagacacacacaccaccacgcctggataattttttttttttttttgtagagacagggtctccctatgttgcctagactggtctcaaactcctggggtcaagtgatcctcctgcctcggcctcccaaagtgctgagattataggcgtgagccagtgcacccagcctcccccttttctttaaggattcatttatctccagtcaaaatcaaacttatcaccttgtttcttcttcccccatgctcaaattttccactcacccctgtacacacacacacacacacgcaccactcaccagactaatcctgtataacatcatttgtcaatattaattgtgaactagatacaggcaccagactaatcctgtgtaacatcatttatccatattaattttggactaggtgcaggcactgggctgggcctgaagacatggtagtgagcaagttaggcaactctttttctagtgctttagagacatcagataaatatttacacaaagcataagtaacaattgtgatagtctatgtagaaattttttcatgttttcattcatggggccatcctcttccggcctgtctcaaaacatggccccacttttaaggatttaaaatgggcttggaagcaccagggagacccagaagtgctagaatctgcccttgggccagccttctcctccccataagattccaagggagctgcacacaaatgggagagcaaagttaagatcaggcagcaccgtaacccccatcgcacccctatctggagctgggaccacacacagcacttgggcgcaaggctgaaatgggacctttccttttcccttaagccccagtcctctgccagttggcttccagggtcagctcagtgggaacacctacactacccaggttgtatgggaggatggccaggtcacacccctgcatgacagccctgccagtactcacactgtttccctcttcacatacccttcccttcctgacctacctgctaagttctacctcctccccaggaagcttttctggtgtattcctttcccaccctgagtctccatctcctacttccaagcaccacatttctcctggtagtcttgtggtagtggtatgtacgtgtgtgtgtgtgtgtgtgtgtgtgtgtcttcctctagctgactgagctcattgaaaggcgatgattttaatttgttctccatgatttctcctacagcgcctagtacataataggcaaacaataagtattgctgaaattgagcaatttagtttgggtggccccattaaagaaacctagcataatactctttgggagctaaattttcctgaatgctttctgcctgctgcagctcagctggagctctgagcgggctgagggccttctgcttgctagctgtcccacattcccccatgactgccacccttagagggctactctcctgccccagccgctgcactgggaggtgtacggactgctggggctttggctcttcgaagactgcagctcccccatgctctagaagagtcagaaggccttgggttcccctcctgcttctgctcctggttagtcaaggctatcactgcctattatgtgctaggcattataggagaaatcatggagaacgaattcctcaccttccaatgagctcagtcggccagagggaggaagacacacacacacacacaaacacacacacagacacacacacacacaaacatgtgtgcgtacatactactgggcttcgttagcttagctataaagtagctcgaagtcgcatgccagtttgcaccctaaatgtgttaacgtattggatttggattaggtttggtagtcacaatgtttggccaagtgcttggaactggaaktgaccatagagatcacttctcatgagataaaagtagattgttccttttatttttatgttattttatttttgaggagtcttgctctgtcacccaggctggagtgctgtggtgcaatctcggctcactgcaacctccatctcccggattcaagtgattctcctgcctcagcctcccaggtagctgggattacaggcgcccaccaccacatttggctaacttttgtattttttgtagatacaggktttcaccatgttggccaggctggtcttgaactcctgacctcaagtgatccacccacctcggcctcccaaagtgctgggattataggcttgagccaccgcgcccagctgtttcttttgttttggagatraagtaattcaagactctcccaggtcatacacgctgtgaatggtactgttggcactcaatgccagatcccctgacttgaactctgaggctatttttctcactccacaatggaaaatagcctggaagtgggagagaagaaactcatttcttcatttctggcagcagatcaccaggacctgtcgggaggaggggagaaggatggtgctcctttcttctgtctaccattgagttccatttctctgttactctgaaatagaagggagctcgggagcattgatggagtccagcrgatttctytggaggatgctctttccagccaagaggtggaggtcgcctatatctgcagtgagagctccagccatgaggactacatcaggtgggttttccacacaggcagtccttgccttacacagcagtgcagtactgcaaaaatgagcaagcaagctaaaacaccctgcaaaggagtcagaagagccagtgagaaaattacaattgctctgtgaccaatcacagaagtgtcaaaacattaagaaattcttattgctggttataaatatataaggaagtgaaaaatagtaaaattaatatttagtatgtgtaatttgaaacattagaaacattcagaattaaagtgttttatttctctgtaaaaacccatcgagagtagttttcaacagtagtggcctccttcttctcacyagacagtttaggatgtggagccggcatccttggcaaattatcatactcccttctcagtttggatcagcttccaacgttttctcctttgtgctttcaatgtcataaaataacggttgagttcctttaaccctcaggacctggcagctaacagggaagtgccagctgccttcctcagtctagcttccttctaggttcttacagctgctcccaccatgctgtttcccacgggtaagatgcttcctctttatcagtctagctctagagtagacaaaaacacctctccttggctttccttaaccttttctggcaccagagtgtatttccttaagaaaagtgattctgacataagtcccatgcttataaatatttgtactctggtatccacagaatgaaatctgaactgctgagcacagaattgtaggtccttcacagtcaggcccccagctacttttccaacgttattatcctccacggcctgtagtccactcccctgccacactgaagtttgccgattgaacaaagccccacaaatgcccaagcccctgcatacgctgctcacagtgaaatatactcacatgttgcacctggaaaatgtctgctcatactttgagacccagttcataggtccttagtgaaatcttttcagactgcctcaggcaaagctagccgctgtgggttttgtagcctttatagctaccatgtggtgataggaaatttatttgttaatgtgtctttatttctcctccacagtaattggtaaatagtacttagttgaataaatgaatggttgaatgttcaaattaacacataaccagaaagttgatctgtcacaggatagtagaaaacaatgtgggatacagttcttcctccatatcccgtggcactgactcctacccccagtcatgacacattcacacacagaaactctcatgcctttataacattctgttctctattatgcagagcatttcagtgaagcttattcgaagtgttctttctctgtatttgtctcgtttaccaaaggcagttccttaatgctggcaagcacgtccttgtggaataccccatgacactgtcattggcggccgctcaggaactgtgggagctggctgagcagaaaggtaatgtatcttaccaagagtttctgcctccaggatttctgtgatatcatctttatgcctttaaaacttaaccccatttcagatatctcctcctcctggctacactggcactgtgggctcccaactgcctcctcacccccacactgtaaacacagatagtggagggcagaaggatgggtgggaatttgcaaacttttggtcaaagcttatcagcttattttactcactctaaggaaaaaatatgaattagttttcacctatgcttatgtcatgatattattttggctttattcatgtgatacttatattgctaaatgctgggatatcctaaaaatgctcaaatcagagaaactgattgtcttatttgcatagtttgtagtttttgttgtttctaaacaggaataaccatttattaaatatttagtatatgctaggaacttggaaactctgctaagcacttcatatgttattttgcttaattcttctagaatcccttggaggtatatattttctctagatgctgtatagaaaaatatggctcaaagaagttaatttgtgccaggtcacaaagctaataacatgactactaagtgggaggtagagattttaatcaaatcctacagggctcttaagttcacatttgttcccctaagccataccaccctccagaagggagaaattaagactttcccaggccagacgcagtggctcatgccctgtcagcccagcactttgggaggccaaggagctygggacaaccctgggcaacataatgagaccctgtttctacaaaaatcttttacaacttttttttttttttttttggtggggtacagagtcttgctgtgtcacccaggctggagttcaatggcaccatctcagctcactgcaacctccgcctcctgggttcaagggattctccttcctcagcctcctgagtagctaggattacaggcgcccaccaccatgcccagctaatttttgtatttttagtagagatggggtttcacgatgttggacacaatggtctcaaactcctgacctcgcgatccacccacctcggcctcccaaagtgctgggattacaggcatgagtgaccgtgcccggcatacaaaatttttaattacaagaaaaaaaaaaaaagactcagctgggcacagtggctcacacctgtaatcccagcactttaggaggctctgatggatagattatttgagcccaggagtttgagaccagcctgggcaacatggtgaaaccccatctctactgaaaatacaaaaattaactgggtgtggtggtgcataccggtagtcccagctacttggaagttcacctgaaccttaggaggttgaggctgcactgaaccatgatcgggccactgcactctagtctgggcaacagagtgagaccctgtctcaaaaataaaaataaaaattctttaaaagacctacccagacaaacaaaaaccaagtgagttgatcactactagacctgccctacaggaaatgctaaaggaagtctttcaagttaaagtgaaaacactagacagcaacacaaaaatattgctctctggtaaaggtaaatatatagacaaatacagacttccgtagtattgtaatgttgacatataaatcactttaggccaggcacggtggctcaagcctgtaatcccaggacttggggaggccgaggcaagcagatcatttgaggtcaggagttcaagaccatcctggccaacatggtgaaaccccatctctactaaaaataaaaaaattagctgggcgtggtggcgcttgcctgtagtcccagctactcaggaggctgaggcagcagaattgcttgaacctgggaggcggaggttgcagtgagctgagatggtgccactgcactccagcctgggtaacaccatgaaactctatctctaaataaataaatatcactttaaatcctggcatagaatttaaaagacaaaaaaatacaaactatgttaatggatgtatagtataaaaagatgtaattggtaacattaatagcaaaatggggggtcagagatataaaggagtagaattttgtatgtgattgagttaagttgttagcagtttaaaatagattatgcagtcgggtgtggtggctcatgcctgtcatcccagcactttgggaagccgaggctggtggatcacctgaagtcaggatttcaagaggagcctgggcaacatggtgaaactccgtctctactaataatacaaaaattagctgggcctggtggcacgtgcctgtaatcccagctactccagaggctaaggcacgagaatcgcttgaacccaggaggtggaggttgcagtgagccaagattgtggcattgcactttagcctgggcgacacagtgagactccatctcagaaattaaatacatacataaataaataataaaaatagattgtgcctgtaatcccagcactttgggaggctgaggcgggcgaatcacctgaggtcaggatttcaagaccagcctagccaacatggtgaaaccccatctctactaaaaatacaaaaattagccaggtgtggtggcgcgcacatatagtcccagctactggggaggctgaggcaggagaattgcttaaacccaggaggcagaggttgcagtgagggagatcgcaccactgcactccagcctgggcgatggagtgagactctgctcaaacaaaacaaaacaatacaaaactgacaagatgtaatgaaagcagtactaagagagaagtggatagttgtaaatgcttacattaaacaagaagaaagatctcaawtcaacatcctaactttacatttcaagggactaggaaaagaagagcaaactcaatcgaaaattagcagaaaaaagcaagtaaagattagaacataaataaaatagagagtagaaaagcaatagaaaaaaatcaacaaaaccaagtttttttgaaaaaaatccataaaattgacagaattttagcagattaagaaaaaaaagagtcggccgggtgcagtggctcacgcctgtaatcccagcattttgggaggccaaggaggacagatcacaaggtcaagagtccaagacctgcctggccaaaatagtgcaaccccatctctactaaaaatacaaaaattagccaggcatggtggcacatgcctatagtcccagctactcgggaggctgagacaggagaatcacttgaacccaggaggtggaggttgtgctgaggggaggttgtggtgagccgagattgcaccactgtactccatcctgggcaacagagcgagactctgtctcacaaaaaaaaaaaaaaaagaaaagaaaagaaaagaaaaaaagagtaaagactcaaactaaagtcagaagtgaaagaggagacattacaacaaatgctgctgaaataaaaaggattatatgagactacaatgaacacttatacaattgttatactccaacaatcggataatctagaaagggataaatacctagtagcatataacctactaagactgaatcatgaagaaacaaaaatctgaacagatttataactagtaaggagattgaaccagtaattaaacacctcccaataaagaaaagcctaaaaccagatggcttcactggagaattctaccaagtgtttcagtctcttcaaaaagtggtcccaggaaaacaggatatccacatgcaaaagaatgaagttggacacttaccttacaccatataaaaaattcactcaaatggattaaagaactaaatttaagacctaaaactgtaatattgttagaagaaaacatgggaaagcatcaagatattggatttggcaataatgtcttacatacgacatcaaaaacacaggcaaaaaaagcaaaaaacagacaaatggactaatcaaacttaaaaccttctgtgcctcaaaggaagcaatcaactgagtgaaaaagcagtctatgtaatgggtgaagatatctgcaaatcttatctttgataagagatcaatatccagaatgtctaaagaactctacaactcaacaacaaacaaaccaaataaactgattttaaaatgggcaaaggacttggatagacatttttctgaagaagttattcagacggcaaacaatcatatgaaaagatgctcaataccactaatccttatagaaaatgcaaatcaaatccayagccaccgtcagtaaccaccagcatcagtcagcagccatcaacatggaagcaagaccttccttcagcaaaaagatggaggatcagatggtagcattttttgtttgtttttgttttttggttttttaagacagtctcgccctgttacctaggcttgaacgcagtggcgcaaacctccgcctcctgggttcaagtgattcttgtgcctcagccacctgagtaactgggattataggtgcacaccaccacacacagctaatttttgtatttttagcagagatggggtttcgccatgttggccaggctggtcttgaactcctggcctcaagtgatccgcctgcctgagcctcccaaagtgctggaattacaggcatgggccaacatgcccagctcaataacgtatttttaaattaaggtacgtacgttgttttcctaaacatagtgttatcacatacttaacaaactacaatatagtataaacataacttgtgtatgaaccgggaaactaaaatattcatgtgactccctttattgcaatattcactttattgtggtggtctggaatgaaacctgcaggatctctgaggtatgcatgtaaccgcatacaaccatcaaaatctggaaattggcattggtacattacaacaatctaatcctcaaacctcattcaaatttcaccagttgtcccaataacattctttatggcaaaatgactgagttcaaaatcatgtattatcttttattgacatgtcacttttagtgtccttcattctggacagttcctccatcttttcttgacaattatgaatattacagttagttattgtgtaaaatgtccctaaatttgaatatatctgatgtttcttcatgattagatttggggtatgcatctttcacagaaatagtatgcaagtggccaggcatggtggctcacacctgtaatcctagcactttgggaggccaaggcrggcagattacttgaggtcaggagttcaaaaccagcctggcctacactgtgaaaccccgtctctactgaaaatatcaaaaaaattagccaggcatgatgtgggcacctgtaattccagctactcgggaggctgaggcaggagaatttcttgaacccgggaggcacagtttgcagtgagacgagatcgcaccactatactccagcctgggtgacagagggagactccccatctcacaaaaaaaaaaaaaaaaaaaaaaaaaaaaarggaaacgatgctgtttttcacattgtgttctgtcaggtaacatccaatatcagttcatctaattactaatgatatcacttcattaggtggtgtctgacgggcttttccactgaaagttactttttttccctttgtaatcagtgattattttgtgagaaggtagtttataactagttaaatatccattctcatcacactgtctgatattcatttattattttatatcagtagaaactcatagctttgttttgtttttctattcagtgctgttgttactttttattattcatattgatgtccacattgttccaaatttgctcagtggggaacctcttcctgccagctcccttgtcattttgttatgtttccattattctttgaattcttgctttctggcacaaagtggttaaggctcatcttgtactttctctgcctcagccttggaattagtcagttctccaatggctaataacgttttgatggcaagatttggacactgcttgtgcttatggctttgggctatctctgcaagccctttcagtgaacagacctgggaatatatggatacggatgtgtgtgtgtactgtggttaccatgtgtgtttatcacaatcaggcattgagtgaacgacaggaaaacaacmaaagacacagctggaaaatacatagtttctttaataaccatggatgtggaaacacagagactgttacatagtgctggggaaaatataacatgttccccagagtttcacggtggggtggggggcagtgggcgaaactacctgtgaggagaaaagcttgtacttattgcaaagcattttgtgccatttagttgttgcaaagccattttgtgccagaaagcttctacttatcacaagaagttccttttgccacattcacgtctgaaggagtgggtgggaaggaccccatcctcccacacacctgacatttctggagactcctgcgacagacatcctccttgctcctgaggtgcaggtcaagcccagagcatttggcagtatttgctgtgatgctgggttagacaaaggcaaccgtcccaggagcatctcccactgacccagatttctgtctgtttcagtgaaactgtagatcataaccacactttgtacttaatcacaaaatagttctggtgttttaggaagcttttggcctagaaatgaaaaaatttttatagagcgaaaaaattttatatagcaaaaaaattgttaacagctttcttttataatccaaaatttattttattttatttttakttttattttttgagatgggctgcagtgcactggtacgatcttggctaactgcaacctccacctcccaggttcaagtgatcttcccagctcagcctcccaagtagctgggaccacaggtgcatgccaccacacctagctaattttttgtattttttgtagaggccaggttttgccatgttgcccaggctggtctcaaactcctgagcttaggcaatccacttgccttggcctcccaaagtgctgggattataggcatgagccaccaagcctgggcacgttcttactctgttagatttttatgctgcactgcctcctcctgtctagaacagtagctaactgtctcctggcccacagacacatccctgatctcatcttgcctttggacacaggtagataccatcttgttctcttarattttcatttcatttctcaggttttcgtttcattcatwtctctttttttctttttctttttgaaacggagtctcactctgtcgcccaggctggagtgcagtgatgcaatcttggcccactgcaatttctgcctcccaggttctagtgattctcctgcctcagcctcccaagaaggtgggcttacaggtgcccaccaccacacctgggtaatttttgtatttttagtagaggtggggtttcaccatgttggccaggctggtctggaactcctgacctcaggtgatctgccagcctcggccttccaaagtgctgggattacaggcatgagccaccatgcctggccttcatttcattcatttctgttgtaagcttagaagtagcagcctcttcagctggggtgggtgacagtggtagggaggccatcctggccatgtgcccagggcagttatgagtgcttcatgtcttgtgttaggggatgacagagtaccctctgggatgcacacctagacacaactgacgactgccctttttattccatttttgtcgttacaggaaaagtcttgcacgaggagcatgttgaactcttgatggaggaattcgctttcctgaaaaaagaagtggtggggaaagacctgctgaaagggtcgctcctcttcacaggtcagtgctacgtgggatcacaggtcacatgtgaggtccaaagaccagccagattmtttcctggctctctgggatgggagcttatattcatttctgctcaagactctctgactcagggccacttaattttcccagatgggatttaattccttggtggcccttgggtaaagagtatrttagaaatctcaagcatatttgtgctctgtcccaacctattaactagttggagattatttttcaacaggaagttgtacattaaaactcttttaaaaggatgagaggtgcttggagaggagaacatttttatacttccttgcaaagcaaatataatatgaagagctcccttcctcctctagcaagttacaaggacattggcagcaaccacagtatttatttatttatttataataaataataaatatttacttattctgttcttactctgttgcccaggtcttactctgttgcccaggctggagtgcagtggtgcaatcatagctcactgtagcctcaacctcccaggctcaagcagtcctcccacctcagccttccaagtagctggaaacacagatgtgcgccacaatacccagctaattttaaaatttktgtaaacagtgtctccctatgttgcccagcctcatctcaaactcctgggctcaagtgatccacctgtcttggcctccaaagtgctgggattacaggcatgagccaccgtgcccagctgaccacagtatctgatctgtatttgtagctgtttacttgatgttggtcactctttgagcagctccgttagcaataggaaatgggcatgcaggaagctcctgctcttgtggccacttttggatgggctccttctctggccgtatcgttgggcacctgggccaccattcctgagggctttcattacagaaaggagaccctgacatggcctggcatttttgcacggtaaagccactgatacatagtrgaacctcatttcaaaatctgtcttcatccttgaaaatggtaatataatgagagtacaaaccattaatttgtacaagaaactgtgttaagttaagtaagttaagtacaagtaactgtgatgtgcattaatccatatgacaatcctataaagtggtattcactacccccattatacagataaactgaagttcagaggcatgagtggcttcacagaggtaacgtagcggtcatgagacagagctggattggagctcagctctctaagtggctgsaactgttgtgggtggctgcttagtattctgtccaaagaactaggctgggcatagtggctcacgcctgtaattccagcacttggggaagctgaggctggtggatcacctgaggtcaggagtttgagaccagtctggccaacatggtgaaacaccgtctctactaaaaaaaaaaaatacaaaaattagtcgggcatggtggcacgcacctgtaatttcagctacttgaaaggctgaggcaagaaaatcgctttaacccaggaggcagaggttgtagtgagccgagatcgcaccactgcacagcctaggtgacaacgagactctgtctcaaaaacaaacaaacaaacaaacaaaaaagaactagagcagacagtaaccagccctggggaagtctttttgttttgtaagtttgatacttaggccccagtgatttcaaaccatattgtctatgaaaattctaatttttgtttggttttatatataacttattactttttaagaatatactcattgttattagtcattgttttaagtgaatatcaaggtcataagaaatgttttgtttataatgtaatgtaacagatatgaagtcttttaaacttaggttatgtttaagattttggctggaggcagacgggagcagtatcttgaccaaatggatttctcacaccaatactcttttttatgtttatatatatatatttttttgawatagggtatcactctgtcacccaggctggaatgcagtggtacaattatggctcactgtaacctcgaactcctcaggcccagatgatcctcccaccttagcttcctgagtagctggggctgcaggtgtgcaccacgacacccgcctaattttgtgtgtttttttgtagagacagagtcttgctatgttgcctaggctggtcttgaactcctgggcgcaagcagtctgccagccttggcctcccgaagtgctggtattataggcatgagctactgtacgtggcctttttaggcttactgcaacctctgcctcccgggctaaagtgattctcctgcctcagcctcccaagtagctggggttacaggcacccgtcactatgcccgggtaatttttgtatttttttttactagagacggggttttgccatgttggccaggctagtctcgaactcaagtgatccacccaccttggcctcccaaagtgctgggactacaggcgtgagccaccacgcctggccccaatactcttttgagtgtacttttttgttcacaagattaggaagactaagaaaacatttaacattgtatcaattttcttgatattgaaatagctcaaaggtattaccattttctccatagctattataataccttcataccttattgccayttacacatcaggtagttataagaatacaggcttgcagggctaaaatactttgattcttctacttttaccagactactttaaatcactaaagaggatatatatatatgtatatgtaggtatgtgttgtgtgtgtgtgtgtgtgtgtatgtatatctacatatgtgtacatagatgtatatattagaagcctgaaacttttttattatcctgtttggctggattgactgctgtttccagtagaatgttttactaaaactcaatttaataaacaggaaaagacagagatgcttttatgatagagttgaagttcagccacctgagttttcatcagtatcattaatcacgttgcctgcctaccacataaggcaaggtcccattgtactgatcactcggccacatcttttcacacccccgccacccccacccccctgtcctgctttccacttggcattcctgcttcccagttcccacagcatttgtgatttcccacagctggcccgttggaagaagagcggtttggcttccctgcattcagcggcatctctcgcctgacctggctggtctccctctttggggagctttctcttgtgtctgccactttggaagagcgaaaggaagatcagtatatgaaaatgacagtrtgtctggagacagagaagaaaaggtaagtcatgagaagccatgaggaggaggaaatttaaggacatcctagtacatttgcaggtatgatccaaagggagccccgaggggctagaccctcactcccagctccagaagggctgtctgcttctgcagatggagtgctgagattgcacttgtgttgcctcatctcatcctctcagcagccctgtgaggtaaagaagacaaacataatcccatctgccagtcagtagacagaggcttacagaatgccagcaggttgcctaagtcatgcaagtcattcatagcagattagtagtggaaattacattaccttggctgggcgtggtggctcaggcctataatcccagcacttggggaggccaagggtggtggatcacctgaggtcaggagtttgagaccagcctggctaacatggtgaaaccctgtctctactaaaaatgcaaaaattagccggtgtggcggtgcatgcctgcagtcccagctccttggcaggctgaggcaggagaattgcttgaacctgggaggcagaggttgcagtgagctgagatcaggccactgcatttcagcctgggcaacagagcgagactccttcttgaaaaaaaagaaaagaaaaagaaattatgttaactctgtgacctgatttttttcctgtgttttcttatgaaagttttcgggcatattgtgaagttgaaagaatttttaagtaaacacccatccacctactccctagaccctgccattaacactgtacatgttccccgcagggccacacattcacccctcagtgcagccagagtgtgagggtctgtgtttcagctttagcatcccatcaccctgtcacactgttcccaaaacattctgacttatttctcataycaggtcttttttaacaaaagcacattcataattttcctcccaaagcacctgggctctgtaaattatttagaacagtaagggttttagagtgtttctggatgcctttgcagagaggtgggtctcctggtagtaaaagaagcagacaytgggtattttaaaaagaaaaaagaatttgagttcctgaatgaagcctgatctagtccattttgaggagtttcttcttcgctaggaaaaggcagagaggcctggcagatgaaagcaaagcacatggaacttggcagtgctccctatggagtgaccaacagtggtggcccgggctctggtgtggccatgtgagtgttaggattgcagccgtggtcagacctatacacagacagttgtagcaccctgtaattagaggtaaagatactgtagggtgctgtaggagcacagggaaggggaacctggactaggtcagctcatggttctgatgggaggcggtgccttgtttggtcttgaagttgagtagaagtcaatgaggaagcaagatgttggggaggcagaggctgactctctctctctttttttttttttttatgagacaaagtcttgctctgtcacccaggctggagtgcggtggtgtgatctcagctcactgcaacctccatctcccgggttcaagtgattgtcctgcctcagcctcccgagtagctgggattataggcgcctgccaccacgcccggctcatttttgtattgttagtagagacaaggtttcaccatgttggtcaggatggtcttgaactcctgacctcaagtgatctgctcaccttggcctctcaaaatgctgagattacacgcatgagccactgcacccagccctgrctctcatttttgcacaggagaggcaagcatcagatgagggattgggacagagagcagttaatataatataatagtaacttcttaaaatcatagtactttccgtgtcccaaattgcatttttaaatttttttatctatttatttatttattttgagaccgggttatgagactggctgattttcgtatttttgggtaagatgggtttttgctatactgtctaggccggtctcaaattcctgggctcaagcgatccacccacatcagcctccacgcctggccacaaactgcatttttatctcacaatgtcacagcaagataggtaaagctgtatacttattaccattacttatttttactagtgaggaaattgaggtacaagaaagatcttgacattctgcattccctcaaatcccaagattccatattatttaaaaggacatgagaggccgggcacaatggctcacgcctgtaatcccagcactttgggaggctaaggcagttggatcacctgaagttgagagttcaagaccagcttggccaacatggtgaaaccttgtctctactaaaaatacaaaaattagccaggcgtggtggcaggtgcctgtaatcccaggtactggggagcctgaggcaggagaatcgtttgaacctggaggcagaggttgcagtgagccgagattgcaccactgcactccagcctgggcaacaagagcaaacatctcaaaaaaaagacatgagaaattttcttaggcagactaygtagaatacctcaagtttatttttattcagtgccaaaataaaagttaatctttgttgccatctcccagaacatttgctagactgtactatgagcttttaaaactagtcatgggaggccaggtgcagtggctcacgcctgtaatcccagcagtttgggaggccaaggcaggtgggtctcttgaggtcaggaattcaagactagcctggctgacatggcaaaaccccatttctactaaaaatatttttttaaaaagtagccaggcatggtggcaggcgcctgtaatcccagctacttgggaggctgaggcaggaaaattgcttgaacccagaaggcagaggttgcagtgggtcgagattgcaccactgcactccagcctgggtgacagagcaaggctccatcccagaaaaaaaaaagtcactgaatgaattcccctgcctgatggcaaaattaaattaaagactgtttggctgtgaggttgacacagtcacccacagcctctgggaggctggtggctgcaaggaggatgggtgcctgacaaggacatgttaccaggcggtctggtgccagcaagcacccacttgtgctcttgtgtaatctctaacatgattcttttgtcttttgtctttgcagtccactgtcatggattgaagaaaaaggrcctggtctaaaacgaaacagatatttaagcttccatttcaagtctgggtccttggagaatgtgccaaatgtaggagtgaataagaacatatttctgaaagatcaaaatatatttgtccagaaactcttgggccagttctctgagaaggaactggctgctgaaaagaaacgcatcctgcactgcctggggcttgcagaagaaatccagaaatattgctgttcaaggaagtaagaggaggaggtgatgtagcacttccaagatggcaccagcatttggttcttctcaagagttgaccattatctctattcttaaaattaaacatgttggggaaacaagaatcttattgttatgagctatgttgggatatttggggttaggggctatgcagtggggacaaggcgagaatgagcgttggttgagctgagctaaatgctttgtatgtctgatttcacttactcctcctaacagccctatgagatgagtactagcaggcctctttttttttttttttttttttttgagagtctcactgtgtcacccaggatggagtgtagtggcaccatctcggttcactgcagcttccacctcctgggttcaatcagttatcctgcctcagtctcccaaggagctgaggattacaggcgcgtgcctaatcctggctaatttttgtagttttagtagagatgaggtttcgccacgttagccagcctggtctcgctcgaactcccaacctcaggtaatccacctgcctcggcctcccaaagtgctgggattagaggcatgagccaccatgcctggcaccaggtctcttttcattgtatactagaaaatgttgtttgaacagaaccctccgagatgatagagtcaccgcccttctgctctcgtgttctcagctgccctatctaccctgcaggttgctgctgctgctggagcccacgcaggtcatgtgccactgtggcatttcctaaacactcctgcctctgaaggtggcaccccatgccccagtcacaattctttcagagtgtcacagaaggaaagaatccacatgtattcctcagcagtctgtccctctgtccaatttgaagaaaaaaaaagcccttaatcccgctgtactaatgctcctaagtgttgaggggtccttcaggagggccttgtgtctccaggcaagagtgaccacagaggtgccctttgcccctcagcccctctccctgtggcagcagtgacctgcctgtctggtgaagctggaaaagggactaaacacatgacacccagccaccttctccctctgaaccgacatccttaggatgcacccaagcttgtccacgtggcaggtgactaaagcagactcttcctctgcaagtaggtgacctgcagctgtgatgaagaattgagttaccctaagacagggcagttaccctaagacagagcctaagacagttaccctaagacagagcctaagagttaccctaagagtttaagagcctaagacagagttaccctaaggtggagcctaagagttatcctaagacagagttaccctgcagggagccaaaggcccgcgggacgtgaccaactcagcattccgctggaggctatatgatcaaacagcgaactgtttatcatgaatgcaggatgtgggcaaactcacactgccttgccaccaaaatgtttgctgagggacatcatgccctggcgccgggctcctggaagttatctattgagaaatctagcgcctattgttcacaagcccgctgtgaaccaaacggctgactgacaattacccgacaaccatcctcccactttcttgctgtctctttcacctaataaatacagagggctgtgtaaagctcacggcccttgtccactagaggcaagatgccccttgacctcttcttccaaatatactcttttgtgtcttgtcttttattcccacattcgccccmctttgttcagtcccccgaggtccatgcaggttacaagtggcaccccaaacagcaacaggatcgggtgctctgcatagtggcatccgaacacaggacttcgaggacatgaatgaagaaagtccgctggagcagaggaactgaaattgacaaggcgaatggggaccccgaaacgagtctgccagcagcagagataaggtcagtgccctaaagaggtactgatcagtgccgtaaagaggtactgggagcagtgctttaaagaagtactaggaacaggaagttttctgaatcaggctaacaaggggaagaatttgtctattgaagaaaaacattatgtgcagttgcttaaagttctgtagagacagtctggagcttaggttaattcgcagacactaacctcctgcagaagccacaaaaggttattacgcataacccatggttcccacaggcaggcatccttgatatggaaaattgagacaaagcaggagaaggattaaaacaggctcatcaaaaaggtcttagctgattcttagttgattcttctgttttctccacttggagtttagtttgtactgtacttctaccattatctccttattattctgtgggacaacagcctgaatctaaaaatctgaaagaatatgttgtcccacccacagctccaattgaaaataaaaaacagagaggataaaaattggcctataccgcctcctccaattgcagaaacatctgtactgcctccttcagtagcacaaatagaaaccccaatacaaagaattttacgctctgctgtcatagctggagagcccttaggaccttgcgctgttcctgtttccataaggcctgatcccaataatccacagcagtttattcatgaacacaccccactagaatttcagttgttgaaggaattaaaaactagtgtggtcaataatggagtacaaagcccatggttcccagaggaaagaacactagatgtagaactctgggaacaagtggggagaaatcttaaacaacatcaggtgcaaaggcatcaggtcccagtaaaatctttaatgttatgggctttaattagagcagccctggctcagttacacacagaagagcctaaaaagaggaaggaggagaaaatgtcacctgccttatcacctcctcttccctcagtcccaatatcactgggtcaaaataacaggaaacggaggtctcacctaagtctcctcctccaatagataggaaaaaggacagaggatatgctatagccatcagtgtgttagatatgagttctaaatttctctttaaagaatcagtatgtcagtatgttcaattctttgccttctacttgtaaacttaacttcctcataaagcaacctttttcgattacctgctccatcctgactcattccgatttcctgctctgccataacyattkttcccgccaaaccactcaccctgtcactctctttaaattagccagttggagttagtttggcctgtgtggtctaaccctagccaataggggaatgacacagcagcaggggccatgtgcatcagggataagaaccctttcccctcccttgtccaggtgtgcactcaaccattgctccatctgtaagggcgcacccttctgtagaagtacattgacttgctgagaattaaaaagaaaattttatattcaagtgctatttcttttgcggcaccgaaactttacttaaaacaacttgggggctcgcctgtgattacattcccctccaggggtagtctcaagtcctctctcatgaggaggcgcgccccgcccccttgtggcagcctcaggggtgagaaattaggacccacccagtgcaaggaataacccgagctctcagcaaagcaaaaagaaactggccagcaacctagctggatcctccataatggcctccataacggccatgcaagtctgtgcacggacggaggaaaagacaccacgggagccagtaaagtatatccttggtggtcaggaccaaggtaagaaagccgcgggggggcaatgaagtactccttggttggggtagcatagaggttaaaaagaggcaagacatcacacaaacctccagtagtagaaaaggcaagaaatttccaggggggaaattgagctcaccccaaaaggcaagagatttccagtggggaaattgagcctcaccccaaaaggcaagaaatttccagtgggggaaattgagcctcaccccaaaaggcaagaaatttccagtaagggaaattgaaccttgaaccttaacccaaaaccatcaagatgggaaataccccaagcaagacagggagcaagataaataaagatggtaacaaagatrtcatcctggatggccccctaggtctcatgttaaaatactggaaggataatgaaaggactaaacataggaaaaagcaacaaatgataaaatatttctgttttatttggactcagggacccatcctcaaatccttgatcttctggccaaagtttatgtcgaataaggatgtaatgtgtcagcttctaatccgacgtgttaatgataaaggtccagtgtctcaagaattaggctatgccctttgctagaggcaaggacctactctcctttttcccttaaaaacagatagggaagaacccaatctggcacctcaaaatgaaaagtcagaggagccagttctcatgcctaaaaattccagcacatgggatcccctagactatctttccccgttcagtgtccccaatctttcccctcagacagccactgctgcctcagatcctgttccaaatccccacctctactctcgttatccctcctccttaaaaccctgactcttaggaattaccatcccacccgcctgttccctcccaacctaaatacccctctctaaaaggactccagcgtgaggtagaacagtgtaaaaaaggatattcagaatttcccatttccctccgtatctaagggttcagccccgaccctcttccctttgaaagaggtaccacaaggaggggtgggggaggggggcacttgctttgtaaatgctcccttgaccagttcagaagtccggaatttttaaaaggagcttaaaccgctactagatgacccttacagagtggcagaccatattgaccaattcttagaacctcagttgtatacttgggtcgagttaatgtccatcttgggcatcctcttttcaggggaagaaaggagtataattcgtagggctgctatggtagtttgggaacataagcacactcccgttgaaaatgttcctaccatggaccagaaattctccgctcgaaacccctggtgggacaataacaacgcagatcactgcgaaaatatgcaggacctaagggagatgataataacagggatttgggaatcagtaccctgaaccccaaatctttctaaagcatttgatatacaacaggaaaaggatgaagggcctatgagattcctagacagactgagggagcaaatgaggtaatatgcaggcctcgatttggatgatccccttgggcaaggaatgttgaaactccaatttgtcactaaaagttggccagacatttcaaaaaagttacaaaagacagacaattgggaagactgtctcctaagtgagtttctcagggaagctcagaaagtatacttgaaaagggacaaagaaaaacagaaacaaaagacaaaacttatgttttggggaaagagagagagagagaggaggcagagagagagagaggaagagacaaagagggagtcaaagagaaagagaaaggcagagagagaggaagagacagagagggagtcagagagaaacacaaagttaaagagagaaagagagagatagaagtagtaaagagaaaacagtgtacattatttctttaaaagccagggtaaatttaaaacctataattgataattgaaggtcttctctgtgaccctgtaacactccaataccacctttctgtcagtgtaaacaagggcgtagcccaagagcactgaggccactgataatccatagccttcctaatcaaaaatccgtaacccatggatggcccaaatacattcaatctgtagcaacaactgctttgctaacagaagaaagtatgaggctattcggttaaaaaaaaatgattcaacattaactactgaaaattcccttaacccagcagatttcctaacagggtatctaaatctcaattaattactataaaaaggtctgaccagacctaggaggaactcccttcaggacaggatgatagatggttcctcctgggtgtttgagagaaaaagacacaatgggtattcagtaactgatagagttggatatgagttctaaatttcttttcaaagaattaatatgtcagtatgttcaattctttaccttctacttttaaa
